United States Patent Application Publication US 2025/0295137 A1 - sequence listing, part 9

SEQ ID NO: 9 - DNA, 1761713 bp, Latilactobacillus curvatus
  source 1..1761713: mol_type = genomic DNA
gttagctacatcttcaatcgttgtaacgttgttttgaccagataaaggaatcgaaaagtctggatattcactgcccggatcagtcaaatctgaaagccagtatcgtgattgaataatcaccgatttactcgtgttcgatttaacgctttcctttttctcagaaatacttgaactcgattctgaatcagaactctttgaactcgacttactatctgagcttgttgaagcactgcttgtcgattgtgattgcaacgaactggctaagctttcagaaactgagctcgcgccttcaattgcgcttcgtgggttcacaatcttagaagtcgtgttggctgtcaccgtctccttattcacagccaccactaatgcgctaccaaatgactgtacgattgtagtggttaagaaaataattgctaaaattagatggacgactctcttttgcatatcaaatttcctcccagttctaatgcctttaaaactttgttacatgataatttttcgatattttgactatgttcatcaggcataactttgacggtatcactacttccccctaggctagactcccaagaatgcctatgcaggggtgaatattagtcatctaaccatcattacccaagaacaatatgtaacgatataagaggttcacaactcatgagttatgacctactatcatggattttttaaagtcattacgtctaacttaattttgcttacaaatgttgatataccagtaattaagctggatttagtccaaaacaaaaagcgtcttccaaacattattcgttggtgtctggaagacgcttttttaacccttattgtcctttttgggttgtttctgcggttattggctcgatttggtattctttttcgatattatgggctactcggttgaagcttttcatcatttcgcgccgggtaacaatccctgtgaactccccttcatccgaaatcacaggcagataggggtgatcaactaagagatggagcgtttcttcaatatcatatggatctctaatcgtcacgacatcggtttgcatgacatctttaacggtcagcttccgcaaattttcgaaactgaggttattcaatccgagcatcgtctcggtaattaacggcatcgtcaacatccctttgaacttcgaatggttgtctaagacgggaatgctcgaatatttcaccgtggttagtagaataaacgcatgttccaaggagttgctttcttgaacactcgcaacaacctcaccgggaattaagaagtgttctttattttctaataataagttcgaaaatgcatctgaaatcatcacttggcctccaataaactaatgctacttttagattgtaacaaagagcaaacacaaaagaccatccatagctactaaactttggatagtctttagaattaggcgcgtttaaatgtaaagtgtaactgcgaaacgggttcgaaccgacgattgtagtactggatttgatattggtcaggtgtgacgtctacaacggcgtatgtccctttcaagtcacggaactgcccccgtggttgggcaatgctgccagggttcaagagcagcacaccttcgtgcatttcacaggccaattggtgtgtatgcccatagaacgcgagattagcttggctttcttgggccgctaataaaagccgcattaaatcgccatttacaccatacaagtgcccgtgcgttaagaagattcgttcatttgcaactgggacaacaacttgtgctggaaattgaccattgaaatccatattgccttgcacaacggtcatttggttaaacaagggatcatcggttgttaattcagaatccccgcaatgtaacatggttactggttgatcttgatactgcgccactaactgcacgagaatatcgcgatcaccatgactatcactcacaacaacaaaacgcatactaaacagtcctttcggcgccaaggggcgttgtttttttgaaacgtgcttcttccgacatattcttccggctagctacatcagccaaatctaaacgtgatcctgccgtcgcacgctagtctttgatccattctttccatttatcttctaggttctcaattgcttttgcgcggtggctgattttatttttttgttccaccgtgagttgggccatcgttgcatctaattctggcacgtagaaaagtgggtcatagccgaagccgttatccccacgaggaatacctagaatttggcccttcacgttaccttcaacgactaaatcttcatctggtcggtctggtttagcaaaaaccaatgttgtatggaaggttgcggtccgcttttcagcaggcacacccgttaattcatagagcaacttcgcgttgttgccggcatcgttatgatcaccagagaagcgtgcagaataaattcctggacgaccacctagttcatcaaccattagaccagaatcatctgccaagacaggtaagtgtaagatcgctgcaatttgatccgcctttaggcgagcattttcttcaaatgtcgaaccagtttcatcaatgtttggcaattctgggtaatctaataatgttttgatttgaatcccttccgctgcgaagacggattcgaattcgcgggccttacctggattcttcgtggcaatcacgattgtttgttcatcggtatcagccacttggatattcggttgaacggcgcgttcaaaactggcttgacgttgatcattggttcgcgtcacaccttggctcgcacgtaaaataagttcgttgaattcactactattgactgcttgttgtccgccgagttcaagggcgatgatttgttcctgcggtgtggccaccatcgtcaccaagctagtcgctaggtcgctttccgcggcgtctgggtcaccgagtgactcaccagcgaccatcgctgctgtgacggctgcagcgacttgtttggggcctttgccttttggtaataaggttagtgcgcaataaacagcgttgaagagttctgctaataagccgccaccatcttcaagacaggttacggtgatagtgagtgcttcggttgccaataaggggcgtaatgtcgtttgcaaccattctaattggtgcgctgttatgccattgccattgacttgcaaggaaccttctgtaggttgaacagcagcgagcactttggtatcaccgcgttgccataaaacagaagcgggttgttgctttagaaaacgccaagtgacttgcactggccgtaaatcattatcagcacgattattcattcggaccatcgtttttttcctccttaatgataacttgttgggcttcaagggttgggattgctaaccattgacgcgcgattgcttcgaaattggttacagatccggtcgtataggtgtgtagttgcccagctgttgcatcggccaccaactgattgcgatcttgtaatgcctgaatcaaactatcaacagcggcatgcgcggggtcaaccagcgtgactgccggtccaactgtcttttgaatcgccgcggttaataatgggaagtgggtacagccgagaattagcgtatcaattcccgtcccgcttaatggcgcgagggtttcgtcaaccgtgttttgcacagtttcgccactcaattggtttgcttcaatcatcggtacaaaagttggcgcagccaaactcgtgacgtgtgtcgccggtttgagtgcctttagttgataggcatatgcgccactgttaatcgttccggtcgtggcaattaccccgacatgccgattacgggtcgttgccaatgccgcttggctacctggtgcaatcacaccgattacaggaatcgtcaattgcgcttgtaaatcaggtaaggcggccgccgttgcggtattacaggcgacaaccaatgctttaatattttgcccccgtagaaaattggtcatctgccacgcaaatttgcgcacggtttccgccggcttttcaccatatggtaggcgcgcttgatccccgataaagaccatgtcttcgttgggtagacgtttaagcgcctcttttaagagggttaggccccccacacctgaatccataaaaccaatgggttgtttttgcatattagatttctcttttcatttcaggatacactcgtaacttctattttctcttttttcggtgcaaaattcaactaaaacaacgggcacggccggcaattcacagttggcgttaatttttataaaaaataaagagttttcgcggtataataggagtacttataaaaaacgaaccataaaggagtgccactgtgactcaatcacgctatgaacaactcgcccaaaatccacaaactgcatcatatctgacacaggcaacattacgggatatcttgttaccatcaattcttggggccgaaaatgacgccatcagctattgggccggtaagcaactcgctttgcaattcccactcgattctttcgaagacctctgtgccttcttcgaacaaatcaacttcggccatctcagtcttaagaaacagaagaaggaacaatacttcttcgaattaacaggcccgattgtcgcttcacggattgcggatttcgatactcctgacttccaattagaagccggcttcgttgcccaaatcctcgaacaacaattgcggattgtgactgaagccaaagcaaccattgaaaataaaaaaaacgtaacgattttcgtccaaacagattcaaaagcaccaattgaagacgaagcagtcgaagccattcatttaacggttgatgcatcacaagtcgcatctgtaccaagtgaatcagaatctgttgaagaagaaccagcacctgtgatgacacaacctgttgaagcagcccctgaagaagtggctgctcccacactagaaccagaatccgttccagaaacaccagttgttcctgaaccggtggaaccagaaaacaagccaacttctgaagaaacaccacactacacaagaacccgcgtggcagacttgccaagtcgacgagaaatgcatagaaaacacagataagcatgtgctataaaaaaagggtaggaacaaaattaaattttgttcctaccctttttgaatacttagcatattaaacgtgttaatcctcaagtgataaccggctctgtctcactctaatcaaagtcatggacgttattgccgctgacgttttgccagtcgcgacttaagaagtcgtttgacatgtcatagtgcactgcttttgcttttttcgttctcatgaatggttggagtttttgatcaactttcaaccagccacgccagccaagatgaatcgtatcttgcatgaagaattgttcattaccgtcgttagtcatatcaacaatgttgttgaagccttgcgttctcaattgatattgaatcttcttatcaaaacgattcaacatcgcttgtgagagccctgtataagcggcccaacgcgcattaacgggtggaatgatgaattgaacagatactttatgggctgcgaagtaatctaacatcaattggaaatcagcaaactcaggtgaactttcatagttaaagtgactttgttcacccttcaatttaccaacattgggtttaacccgttttttgtaaaaactattttgaatgccaaacggattatcacccgttactttttgtcctaattccgttgcgacttgatcaagttgcatgttatcaggttgttttggtaacaccttcaagcctttacgcaattcgcgttcacgaccccgaatgaataattggctgaagagttgatcttgatgttgtaacgctgggcgtttcacattattaatgtatactttttgcgtctccgttaaaggtatgcctaaagctttgttcttcaatgcatcccgcattaccccgttggttgtatcacttgtgagttctagaattcgtttcgctgcataccgcgtactttcagaatccttcgcgtggattaagaaataactggtttgtagtggtgaatagaagaaatcgaacatctcaggttttaccccttgtggtacaaaccattgtggcgaaataacgacgacggcctttttaccgttcaagtgattaccagtcgcttgaagtgataaaaagtgggtcaatgactgagtccctggtgcccctagtaggaatggcttattttgccaatcatacttgtttgccataacagatggatgtaacgcgtccattcgggatagttcggatgaaccaatcatcggaatgtagttgtcgttaaatgcagcatctttgatggcttccccttttagcacattggcggataatgacgtcgccgctgtcgacaacgtcttttcgctaggtcgtcctaatcgaagaggtgatagtaataaggctgttaagcagagaccggccactaaaaccgggccgaaaatttgccataaacgtttaaacattttattgcaattcctttacgcgagcaatgatcttgttaggtgttgaccatgcttcacgatcgaattctgaaacaggtacttcaatatctaattggccttgtaattcaagtaacatttgcacagttgccattgaatctaatgtccctgattcgaataattccatatccatatcgtctttaatatcgtcgttccctgttaaatctgctaaaatttctactactgtattttctacgtccatgattaaatcgctcctttagtgtgtaggtcttagtggaaccataaccggtccaaaaagcctgagaaaattagaaaactgagacaaacggtgttaaacgttgcaaaaattgctaagtagttcgtccaccgattgctgataatgtgatccttgtgtttcttcttgaaacgcaaccagacatcggtaaggatgatccagatggcgtggaacaagccgtaaacaatgtagtaccatgtcaacccatgccagaagcccatcaataagaagagtgttaaatagccgagattggcaatgaggaccttgttcttggtaatcttatgtttcatcaagaagaacactaagcgcatgtagatgtaatctctaaaccagaatgataatgtcatatgccatctattccagaattccttgatattggttgatgcaaatggcttgttaaagttaattggcgtttcaacacccatcacataacttgtcgcaacagcgaataaactgtagcccgcaaaatcgaagaataaatacatactgtaaacatacatgtaaccaacaagcccccatgagatatcaaggaacccaccgcgactcgccattgctaaatgcgcaactttagggagtaacacggtcccgaataagtaaccgagcataaacttatacacaaagcccaacatgaagttgtggactgccttgcccagtaagtcgagataatggtcacgatcaggaacttttaggtaatcttttttgaaacgacgataacggtcaattggtcctgatgaaatcgtcgggaaaaatagcataaattgtaagaataaccatggttcaaatttcttaatactgccatcacgggtttccataatcatcccaactgacttaaatgtcagataactgatccccaagaagccaagaattgaattactacccggatttaagaatggcacgaacttgacaatcactagcggcataatcgctaagataacagccagatcgaatagccaggtgttgttgtgcttttgacgatagacagtgtatccccaaatcagtgctccttcgaacaggacgtaaccaatcaaggcaattccctggtgaaccttatccccgtcaaagattaggatcaaaaagagcagtgagacaagtgtctcataaacatgccaacgtttgccgttaagtaagccaatcactaacggaattaacgccgcacctagaatgagaaagtagttcggattcgcgtacggttgtaaattaggcattgccattaacctctttaatcaacgctttacgatcaatcttcccattgacggataatggtaatttttcttgataaacaaatcgttgcggaatcatgtagtccatcgtattttcagcgagttctgcttttaacgtcttcgttaaatcattgcccgcttcttgaccgtctgctggcacaacataggcaatcaattgggtgacttgatgggctttgttgtagcgcggtacggtacatgcttgatgaacggctgctaattggcttaagtggtggtcgatttcctctagttcaatccggtaaccgtgcatcttaacttggaagtcggtccgccctttataaaagagcaagccatcttcgttttgggtgaccaaatcgcctgaatggtagaagcgttgcccgtctttttcgaagaaggctgcagctgttttttcaggattattcaagtacccttttgaaacacttgggccactgattaagagttcaccaggttgaccaactgcgactggattattttgttcgtccactacgacagtttgagtatcagcctttgtgtagccaattgggagtcggtcgtaagtcgctaagacctccgccgtaatttcgatgctcgtcatcgcaacggtcgcttcggttggaccgtaagtgttgaagatttgtgcatcaccgaaacgttcgattaacttcgttgctgtttgatgcgttaattcttccccacagaagacgaattgttttaattctgggaaatgttcactatcaaatgttggtgataataagcagatttctgcaaaagatggtgttgaaacccattcgttcaccttaagagttggcaagacttcaaataacgtcttgaagttgtccgtcacagctttttctaaaacgacgaaggttgcacctgagcataacccgggaaataaatccatgactgataaatcgaatgagtatggggcctgaattagaacgcggctgttatccgcaacgttgaaagctgggttggcccagtcaacgaaactttgtaaattgctttcgctgatttggacgcctttaggtaaccctgttgtccctgacgtgaagatgatgtagaaattctcattcccttgcacactttggctagcatcataatcggttgctccgtttgcaatcacatctgtcaattgaggttctgcgaaaacgggcatattaacatcaatcgctgtttcaccagcccatgataggacagtagccggcgttgcgactgattcaatctgtttaatccgcgctggatctgaatgttgttccaccggaatataagcatggcctgctttaacagcacctagaaaagttgctaccatctcgaagttttgaccaccgaagataatcaccggtgctttagctggcaagtcttggctttgaatgaaatgagcaatccggtctgaagcagcctttaagtcggcgtaagtgtgttgcgtcgtgcctaattgataagccacagtttgtggttggtcaattgcaatcgcatcaatttgttgaatgatattctttttcattttaacgacgctccttcattagaattcattgtagataaatttaggactaccgataccactgtaatcatataaataaagtagaattagcagaataacaaaataaattatggttttgccaatgaaattgacggccggtttattccaaaaattaagtattttttgacccattttttcaccatctctttctctctctttttgattttcatcattttgttcatcattaaagttaccacaacgtttattaaacaaccactaacatttttgtcacacgctgtcacataaaaaaagcacctactaaatagtaggtgttttcataattagtcggtatattgtgccaaaatcgtttctagttgttccttattatggaagccagtaattttttcaacaacttgaccatcttttttaaccactaacgttggaatcgccataattccgaaattagcaggcgtttctggattagcatccacatccattttactgaacttaactttgtcgttagtttctgccaatgattcgataacaggtgattgcatccgacaaggaccacaccaagttgcccagaagtctgtcaagacaacgccactctttgtttcttcttcgtaatttttatctgttaatacttcaaccattattcttcgccctccattcaattgtacaaaacatattatttatcatgatactcctatatggcgtaaataacaacttaactcgcttattattcgttacaaacggattattttatccccgtttaatttaacaagcctaaaaaacacccccaatcaaaaccagaaaggactggttggattgggggcgtaaacgtgctccagcaggcaaactcctccggttagctacaccagccaaacgaccaacaagttggtcattcgtctgcctatgctaatcctcggcgtataaccgcctgcttccgcactctatttgaatgttacgattgttgcgccattgccgcctgcgtttgctggggcgtattcgtatttcttgacttggcgattgccttttaggtagtcctggacaccttggcggattgcaccggtccctttcccatggacgattgtcacttgttggtagttcgctaacaaggccgcatcgacatattgatcaacttcagccattgcttcttcgtagcgtttgccccgcaaatcaagttgggctttaacataccgcgctccaccgctgttgacagttgtcacatgccgttgaggtcggttatcttcaacgactttttgtttctcaaggtcttcgttagcaatcttcatcttgataatgcccatttgaacttcccagttcttggcatcgatttgccggactaatgtcccacgttgaccgtatgaagtaactaaaacatcatcgccttctttaagggtttgacgtcgttttgcccgttgcaatactttgtttttcttcaaggttgtttcttggtgcaattgccctaattccgacttcgcatcgattaattgattttccttaatctgggcgccttgattcatctgcatatcccgcaacttggtaatcactttgtctgctttaacttcagctttttcgacgatcgcattcgctttttctttcgccttcgtcatttctgtttcacggtcttcgaagaattgttgataagcagttgataactgttgatgcaagtcagtcgcttctgctaattcatgccgcaaagcttggtattccgtttcggctgccttacgttgattttcgagatcggtaatcatattatttaaatcttggctttcatcgttcatcaattgtttagcttgttgaacgattgagcttggtaaccctaagcgcgttgaaatatcgaacgcgttactacgaccaggcaccccaattaataaacggtacgttggttgtaaggtagccacatcgaattccatgctagcattaatcgtttgtggccgattgtaaccgtaaattttcaattctggataatgggttgaggcaacgacatcagcgccaacaatcccaatttgatccaagatagcgatggctaaagcggccccttcttgtggatcagtccctgcccccaattcatcgagcaagaccaaactacgatcatcgatatgttgaagaatctgaatgatattttccatgtgcgctgagaacgtactcaagttctgttcaattgattgttcatcaccaatatcagcaaaaatatccgagaagacgccgacttggctctcttcacgcgcagtgataaataaaccagattgggccatcacttggactaagcccaatgttttcaacgtgatggttttcccaccggtattgggacccgtaacaacgatggcctgataatccgccccaatcgcgatgtcattagcaacgactttagctgggtcgattaatgggtgccgtgcttgtttgagttcaacatggttttctaaattaatcagcggttcagtggccttcaacgctttagcaagttgagccttagcattgacaaaatcgagctgccccaataattcagcgttggctaaaatattgtggcgttctggcatgatggcttccgataattccgccaaaatccgttcaatttcttgttgttcttcaatttgtaattggcgcaagcggttattcaattccatgatggcttgtggttccatgaaaagggtctgaccactagcactctgatcatgcacaacgccgccgaattggccacggtattcttgtttaacaggaatgacatagcggtcatttcgaatcgtgacaatcggatcactcagatatttagctttagcaccgtgtgtataacttgccatccgcgatctgatttggccttccaattgttttaaaccagtccgtaagccacgcaacttggttgaagccgtgtctaaaacggcgccatcatcagcaacagaacttctaatcttttcagttagttgcggtaaagtcaccaattgggcaactaagtctggcaacgcctttaaggttaattcatctttttctaagtcatcaaagaaacgcacaaccgcagaagtcgcacgtaaaacccgcccaacttgcgcgagttcggtaccgtttaaagtcgcaccgatttcgattcgtttcaggtgcggacgaatattatctaactgtggcaaaggaatgccaccttttagccgttcaatatcgaccccatctttggtctggtccaagcgttcttgaatcaattccgcatcgttagcgggggttaattgtgtgatttgttcttgaccaaacgccgtgatggcatggccttgaagcatttgtttaattttatcgtattctagtgtttgtaatattttatgattcatttaagttagctccttctaaaaaaggggcgacttccgtcagccccaactgcactatccattttagccagcaatccaccagctcgtcacttgagaggtgaggactggtgtgtgtaagacaatgacgcgcgcaactgtcgagttttccaatgtcttctgtaagccatcgactggcactaaagccagcacgtagaggagcaaaaagagccccacgtaaacgaccaagaaactcaaaagtccaccggctgccttgttaaattgcttcaaacctggcatataagtcaatgaattcaacaatagtccgatgaagcgcaccaacaagccaccgataaacatcacgaggacaaaggcgacgccgatataaaacgcatcatcgagtgacaacccgatactcttttggaaaaatgcaaaatagctgtcttcagttgccgatgggtatggcaccattaaacttagcttaggccctagtgtttggctcatcgctttggcaatccaaaagacgataaagtagccaatcgtgtagacggcttgcatgataaacccccgtctgacccctgtgtaaatggcatataacagcattaagataataattagacttaacatgagttccccttagatacgcgttttgtggcgtggatgtgtgtatgattgattggataaagtattctgaaacgtgctccataagccatcttcttccggttagctacgcctcgcaaacaatcgacttcgtcgcttattcacgagtctatgctaatcctcagaagatacccagcttattgcgcactctgattttatttgctagttcaactgaactattttatcatgaaataagggaaagtggcaattttactccgaatctcttcatttgccactcattaaggagccaatcgtatgcaagcagtcattaaagtgacaccctcacaattaactactattcaaaaaaattatccgaccaaccgtcaactaccgccgggggccgtttttgcgcaccaagccaatggactaagcattaccggctataaatctggcaaagtacttttccaaggcgctagtgccgaacgagaagctgctaagtggggcaccgctacccctagcaaagcaaaatctgctagccgtactaagcctaaagccgccaaaggcgatgttttaccagctgattttgccaaatggtccgttttaggctcagatgaagttggtaacggaagctacttcggtccgctgaccatcgccgccgtctatgtcagccaagaaaatctggcgttcgtcaatagcctaggcgtcgcggattccaaaacgctaaccgatgcacaaatcgatcagatggcaatcaagatgatggctaaactcccctatcacatcgtcaacatcatgccaccgaaatacaatgaagtacacgccacaatgaacatcgaaaaaatgaaggccatcagccataatttcgcactcctcaaagtcctccaaaaaatccaacccgaaaaacccgctggcatcctcattgatcaattcgaaccacgcggcatttactacaactatttgaagaatgaaccggttgttttacgcgagaacgtttatttctcaaccaaggcggaacaatttcacctcgccgttgctgccgcttcaatcattgcgcgccaccaagccaacctatcaatgcttgaactgtctaaaaaagcgggccgccaaattccgctcggcaatcatcaagcagttaaccaaatcgccgcagatttactcgcacaaggtggcatcgattacctaggcgaattcgctaaattgcattttattaacacggaaaaagcgaagaaattgttatagagtgcgactacaggcggtgatattttgagcattaactggatttgacgaattggcgatgtaatcgctgatttggcaaatttagttaagcgcagaaatatgcctgtaagagcacgtttaaagtgcgtttaaagcgggttgactctgagcattagcacagtgttgtgaatgaccgacaaagtcggtcgtttgcgatacgaagctaagcacaagagtcagctttaaaaagcacatttcaacccacaccttctccacataaaaaaagggtcccgactgcaatttaattaattgctatcgggaccctttttgaaatagatggtgataacgtgctttcatcaacaacttcctgtgctttgctacacttatcaaatcggcgattgcatcgccaattcgctaagttaggcaaatgctcagaagttccccgttgatgacgctcttcttttctttaacgtgcttttcaaaccatacttctgcggctagctacgtcccgcaaacgatcgacttcgtcgctcattcacgggactatgctagtcctcaaagtataaccggtttgaacgcacttatttcatgttgtcgtctgccaaaaatgtgtttagtacttcttcaaccatttcccattcttcgtcgtcttcgattgggaataggtcacctttgctggcatcgcctgcatcgtctgatgtgaatgagaaagcttggatatcaacttcttcatcttcttcagcgcttgttgggtacaatagcacgtatgatttaccgtaatcttctgaatcaaatgtaaagagcacttggtataattcctcgttaccttggtcgtcgattagtgtaatttgttgttcttcatcttggtggatgttcttgttatcttcagtcattcatcaaaactccttaattgttttatttattagccttgtgttaagcgaccgtgcgcgtccaagtagttctgcaaaatcatcaccgcagcaagcttatcaatcacttgcttccgtttcttacgtgacgtatctgcttgttccactaacatgcgttcagcctgaaccgttgttaggcgttcatcgatgtaatcaaccggaatctctgggaaaagttcactcagcattgccccgtattcttgcgctttaagcgcccgtggcccaatcgaattattcatattcttgggtaaccccaaaacaaaaccagtcacttgatgttctgcaaccaattccttgacgcggtctaacccaaattctgattcatcttcattgatgcgaataatctcgaccccttgagctgtccagcccaatagatcactaatcgcaatgccaaccgttcttgatcctacatcaaatcccattaagcgcattatttcgtcgtttccttatccaaataatttttaactaattcctcgataatctcatcacgttcgtgcttgcgaattaaattacgagcatcattatagcgcggaatgtatgctggatcaccggacaacagataacctacaatctgattaattgggttgtagcccttctcttctaatgtctgatagaccgtcgttaatgtttcatgaacattcttggggctatttttaccaaaatcaaaatggactgttttatctagattcatctctcaacacctcaacttttcgctacttatacaaccatattctactcgaaaacaggacaaagtacaactctcccctctcttagcagaatgcggatgagagataactataacacatttcgctaaattgattaacaaaaagaacaaaaaaataacgggattgcaatcaataaaaaattgacgacaatcccgttataagttaagcgttcgctaaagctgttttagcagctgccaaagcatctgcgatcccagctggattcttcccaccagcttgggccatatctggacggccaccaccgccaccaccaacgagtggtgcgatttgtttaatcaaatcaccggctttaatccccgctttaatcgcatcaggtgcgaccgcgacaatcaagctaaccttatctcccgcaactgttgcgagcactaagacatctgaaatttgtttttgttgccattgatccgctaattgtcgtaattcgttcattccggcaacttttgcatcagcagccactaagcgccattgaccaactgtttcgacattttcaaaaacattgccagcttgttgttgggcaaattttgctttgagttgttcgttttctttttgttctgcttttaagtcagattgtaattgttgaatcttcttaggtaaatccttggtttgagcaactttcaattcaccagctaattcatttaataaggcttgtttgtcattcaaatacttgaaggctgcctttgaagtcacggcttcaatccggcgcgtcccggcaccaatcccagattcgctcgtaatcttgaatagaccaagatcagcagtgttagcagcatgcgtcccaccacaaagttccattgagtaatcaccgatttgaaccactcggactgtcttaccatatttttcggtaaagagtgcgatggcccccatttgtttagctgtttcaatatcggtttcaacagtattcacaggtagtgcagcccaaattttttcgttcacaattttttccacagtggctaattgatctggtgtgacttgaccgaggttcgtaaaatcaaaccgtaagtagtcaggttcaaccaatgaaccagcttgatgcgtatgttcgcctaaaacatcacgcaaggcttgatccaataaatgcgttgcggtgtgattcttaatgacgccaccgcggaaggttggatcaactgataagacatagtggacaccactaatcatttcttcgagcacttcaacggtgtgtaatggttgcccgtttggtgcgtattgcacgtcagtcactttagcgactacttgcccagctaggttcttaatgatcccttgatcagcaacttggccccccatttcagcatagaatggtgtttggtcgaagattaattgcgccgtaccactcttaatcgtttgttgttcggcattatcttgtaagatgacgcttaacttactttctgtttcaagcgttgtataaccagtgaaggtactttccactttgatatccattaaaagttcgttttgcatccccattgattgttcatcactacgggcattacgtgcacgtgatttttgttgtgccatttcactttcgaaaccagcttgatcaactgttaagccttcatcttcggcatattcagttgtcaattcgattgggaaaccatacgtatcaaataacttgaaagcatctgccccagcaatttcactttgaccagcagctttgacactgtcaatcgtttggttcaataaacgtaaaccatcattcaaggtttcacggaaacgatcttcttcagaacggatgactttttcgatgaattctttttgtgctaatacgtctgggtaatagctttgcatgatttcaccaacgattggtactaacttgtacatgaaagcgtcgttgatgccgagtttcttaccatttaagatggcccgacgaattaaacggcggagtacatagccgcgaccttcattggccggcattgcaccgtcaccaattgcaaacgtcacagcccgcgcatgatctgcgataatcttgaatgaaatatcatcagctgcattttgaccgtattgtttgtggtcactcatcttagctgtcgcttcgatcaatggcatgaataaatctgtttcaaagttggttggggcttcttgaatcactgaaacaagtcgttcgaggcccatccccgtatcaatgttcttgtggggttgttcaacatattcgccgtttggtaaatggttgaattctgagaacacgatgttccaaacttccagataacgttcgttttcgccaccaggatagttttcaggatcatcttcgctaacgttgttgaagctttgaccacgatcatagaaaatttctgaatcggggccacaggggccttcaccgatatcccagaaattatcttcaacttcaatgatgtgtgattctggcaaaccgactttttcatgccaaatccggtgcgcatcttgatctttaggataaaccgtcacgtataatttttcaggatcgaaaccaatccacttgtcgctggttaagaattcccaagcccatggaatcgcatcttctttgaaatagtccccgacagaaaagttgccgagcatttcgaagaaagtatggtgacgagcagtcttcccaacattttcaatatcgttggtccgaatactcttttgtgcattggtaatccgtggattattaggtacaacgcgaccatcgaaatacttctttagggtcgcaacccctgagttaatccataataatgtcggatcatcatctgggacaagcgatgcacttggttcgacatcatgacccttttctttaaagaaatctaagaacatttggcgcacttgcgcactggttagttttttcatcatgtttgctccttcaaaaaaataaaacaccgctgcaatttcaaggacgcaaaagcgcggtaccaccttgattgcaacgatgttagtcgttaacctctttatgagtttattgaattgtttgtgatgttggggagcacgtcaaccaatggcggcaccttctctcagtctagaaaggcgttcctgtctccgtcagttcgttgcgtatatcccaacacttccaaagtataaaaaagatttgctgaattgtcaactaatccaaggtaacggtaatcgcaggccgatagtagcactgaaacgtcggattgcccaatgccgccgtttgaatcccagattcataggcgggtgcttcaggcaaccattgttccaaactataccgtccccctgtcacacaagcaccacccttataaacaagtggatcttgagtaagttcataaccgtcagcggctgttgcttgtaacccaaatggcatctgctggcgctgagtcggtcgtggtaagtgattaccacttaaccacaacgtcttactccctgcacctttaagccattcatactgatcaacactcaccagatcaaaaccgcgccgccgcaatgtctggcgtagttcactttcgtcaccattagttttttcaaacacttggtaacaatctggtcgcccacccgcttgtaaaattaggtgcgcactttcaagtgtttcagctgaattttgttcccgccgcgcccgaaacaaggtattttggatttccgccaaaaactgacgcccaactagttggtttccattaaaacgtcctgttgtcgtttcatactcgccttggagtacccactcacttgaaattggtgtttgtgccactaacatcggtgccatattaacaatccgatattctgatgtcatctgatcaacgtattgatcgacatccgcttgcgtcgcccaaacgagtccttgatcaactggtaacgtacgtttagtttgtgcaaaccactcactcggtgctaagtgggctgcccctgcttgccatcccaactgcacattagcttggccggggataaaaataaactgctgcccagctagccgggcactgtaagtttgaaatacttgagtgccaatcgttgcggtctcactctgaatcgcttcaattggaatcagcgggctaacaaagtagcgcaacacctggccaaaattagcgcgccgtgcttcttcggataacgataaccagttcagtaattgtaagtcattttcatgcatcacagccacctcgattatgaattaactagctattttgcttcttgttttgacgtttcttttcacgtaattcaagtcgttgttcaatccggcgtttcttttgtgcatcttgtttaatggctgctttaatctttttcttataaccgggtttgcgtttaagtttggcctttttgaccatccctttcatgccgacatctaattcatgcgtggtagctacccgttttttacgacggttccgatcatatgatgtgaccaattcgccatctttaaatgtctttggtgtgaacttgatgcccattgcttcaatttgtgcaacggcttgttcatcatctggaccataaagcgtaatcgcggttcctttaagaccattccgaccagtccgaccaacccggtgaatgaagaattctaaatcttcacgtgggacttcagcattaatgaccatgctaatcccttcgatatcaataccgcgggccgctaaatcagttgccacaacatattgatagtctaagttatgaatttctttcataatccgtttacgttggcgtggtggaatatcgccatgaattttagcgactttcaagccttgtgattgtaaataacggtggatgtcatcaaccttgctcttcgtattagcgaaaaccaagaccatgaaaggatggcccatcgtcaataatgaataaatggtttggttgagggctttccccttcgttggcactaaccagttgtcgattgttgggctaatcacagtttcgtttttaacttcttcaatcacaggattgtgcatgtatttttgtaagaagggttgtaacttatcaggaatggttgctgagaagaccatcatttgtaagtcttctggcaaacgactagcgatgtcatcaactggcttcaaaaagcccatgtcaagtgtcatatccgcttcatcgatgaccaagatcttcgctgtataaatcttaagcgccttgctcttgattaaatctaaaattcgaccaggagtcccaatcacaatctgtggttgatgttgttcgagtttttcgatttggcgttgcttgtcagtcccaccaacataacgaccaatccgaatatcccccgtcatgtgttgagtgattaattcggcagccgtatagatttggtaagccaattcgcgacttggggctgtgatgacgatttgaacttcgtctttttcaggcaccagtttatttaaaaggggtaataagaacgcgtgggttttcccactccccgtttgtgattgaccgataacacttttaccagcgttgatggctggaatcacacgccgttgaaccgccgtgggttttgtaaagtgcatgtcgtctaaagccgcaatgatttcgggttttagattaaattgtgtaaattgattatccataaagtcctgctttctattgtttgaatccggtaaatctggatctgcgtctattcagtgtactgcgcggctagcgctgataattctgcaataattatgtcgatttcagcttgatcagctgccttagcgccactagcgagtggatgaccaccgccatcatgttgcttcgctagttcattaatgattgggccctttgagcggaaatgcacgcggtaagtgtcatctgcttgttgcacgaagatgacccacgttaatacccctttcaaacgaccgggtgttccaacaatcgagtgtacttgttgcggttcaacatgtaaccggtcctgggttgcgcgatcaaccactaagtaggcgacttgttggtcgttcacttgaagttgatcgaataagtacccttgtaatttggcttgttccaacgtgatttcgttcatcttttgattgagcttatcatggtgaatatcaaacgtcatcatttgggcggcacattccatggtatgtggactggttgaattaaacatgaagcgccccgtatcaccaacaatcccggcatataaaacacgcgcagctgcttgattgaattgtaagtggccttcgctgttattgacgatgtcaataatgatttctgaggtacttgaggcatcaggtaacacccagtttaaatccccataaggatcatcgttgggatgatgatcaattttgattaattcagcgcctaagttaaacgtctcaccactaatccgaggtgagttggctgtatcagtcacaatcactaatgcaccttgataagcagccggttcaatttcttgaacgtttgcgagccatgccaagttaccggtgtcgctcccgacttggtaaatcgtcttgtctgggtagctgttacgcagtacttcagctaagccaacttgtgagccaatcgcatcaggatcaggattgacatgacgatggatgataatcgtatcgtaagtttcaattttagcaataatttgttctggagttgtcatttattaacctctttctaagagttgaccagtgacgagggccttagccacaatcacatgattggcgtaaacatcgacatcgattttagctgaacgccgtccaatttcgagcaagcgtggtaaaatctgaatctgcgtgtcgatttgaatcaaccgtaaataatggaggttgatctgttcaatcattgaatagcgctgatgttgcgtctggagcatttgttgacaagctgccgaaaccgcttcggtcagtacaccaaacgaaattgtccctaagttattcgtcatctggggcgtcacttcatattcatatgccgccgtataaaagtctgggacagtttcactaggacgcagtggttcgacaatctgatcataaaacgtctcggcgacttgcggttggcgttgcgccgtttgcatgttgctcatgacatcttgccgggtaattaacccttctagttctaaattgtccgccaccactggcatcacttctaaactattccaagtcattgaatggccgacactggcaacactcatgtattttttaacgctcgcgggttccttggtcatgactttatccaaggtcatcgtggccggtttatctaaaatatccttcaccgtcacaatcccaacgaggcgcatatgttcgttgacgactggaaaacgcgattgttttaccgccgcactcaattgcttgtagtcggctaccgtttgattagcatgtaacgtgtggatttcagcaagtgggtggtagatatcagccaccgttatgatttcttttttaatcaattgatcggtcaacgcccgattaatcaatgccgccaccgaataggtatcgtaggcagtttgcaaaatcggtaaagccaagtcgttggccaatgcaatgacgtccgccgaagtgccaaaaccgccggtaatcaaaacagcggccccgttttcaagtgctaagcgttgcacatccgtccgatcaccaacaatcatcaatgactttggcgtaatgtagcgcgtgatggcatcgatttgcatcgcgccaatcacaaatttgtccaacaacttgtctaaaccagcgcggccaccaaggacctcgccgtcaatcacttgaacgatttcttcaaaggtcagattttcaatcttcccctttaacttctgttcaatgcggatggtaccgacccgttcaattgtgctgaccaggccgttattttctgccgctttaattgcgcgataagccgttccttcacttaccgagagtgttttggcaattgagcgcaccgaaatcttgtcaccaattggtaaattttcgatgtacattaaaatttgatcatgcttagttgccactcaacgccaccaccctttatcagatttacatagttattaatagtatatcggttttagcgcacaaaaacaaaggaaactcaactattcacgctcccaatcgtataacggtaacgtgatgttttcaaatgtttgcggtgccaagttagtcaccgtaatcccgagcaagcgcacgccatcttctgcatggccgatggtttgccaaatttcccaagcgatcgcctcgagttcagctgccttgccgacatattcgttaaatgttttacgcttagtaatagtttcaaattggcgattccgcacttttaaaacaactgtcaaaccgtgtttttgattcttgcgtaaacgccgttcaagttcaatcgctaacttcttcaactcaacttgcacctgctcttcactgattaggggttgcccgtaagtattctcattgccaattgatttgcgttcacgttggtaggcgaccgggcgattatcgatgccgcgcacgtgccgatataagccgtagccaagcttgccgaaattttgcatcagcatcatttctgattgttcaagcaagtccgcccccgttaaaatcccgagttcttgcattcgcggcgccgttttcttaccgaccccacggaatttttcaattggcaagcgacttaaaaaggcaatcgcttgttccggcaaaacgagtgtccgccccgctggcttgcggtaatccgatgccatctttgctaaaaatttattgtacgaaatccccgccgagctgacgagttgggtttctttaaggatttctttttgaatgtaggcgaccacatcaattgtgtgtgccaagccgagtttattttccgtgacatcaaggtacgcttcatcaaaagcaatcggttcaatcttatcggttaccgtatgaaaaatcgtgtgaatctgttccgagaccgattgataaagcggaaaattgggcgccttaaaaacggcttggtgattcggaatcagttcagctgctttttgtgcactcatcgccgagtgcacaccgtattgtcgggcaacatagttcgcggtcgtcacgacccctttgccaccagtatcactcggattacgggcaatcacgaggggcttttggcgtaagtcgggctgttcacgctcttcaatcgatgcgtaaaacgcgtccatatcaatgtgaatgattttgcgactcgtatcattttctaatggaatcttgaacagctctgccatgttacccctccttaattttttcaacatgctttttcaggcacattgttccgcttttgacgcacttctttctttaacgtgcttttaattcgtaaccttctgtgctttgctacatcagccaaataatcgcccttggcgcttatccgtctgattaggcaaatgctcaaaggctaaccgcgaattaacgcacttcttcctttaacgtgcttttatcaacaacttcttccgctttacctcacttgccaaatcggcgattccgtcgccaattcgtcaagtgctgtaaatgctcagaagttacccgttgatgacgtacttctttcaataagaaaagcctggcatgagcatctcatacacagactttgctgacttgtttaatttaattattttgagtgggatcaaaaatccattcggcccctgttgttgccagtaaatctgttgcttctttaggccccattgaaccgattgagtaacctggtagtggcgtttgatccgcatcccagacttcacgaatcgcatcgacaaattgccatgaagcggctaattcatgccaatgtgtgaagttcgtgccatccccattgagcgcttctaaaatcaaacgttcataagcttctggactgtcagccaacatctgttcatcatattggtaagccaattgatcaggtttcaaggcgaatccttgaccgacttctttaccattaatcgttaatgaaaagccttgttccggttcgacatagattgttaagacatcaggtgccattgctgaacgatctgacttatcatcagcaaaaatattgacgccagtcttcttgaagacgatattgatttgcgtttctttacgtgccaatcgtttaccggtccggacgtaaaatggtacgccacaccaccgttcgttatcaatcatcactttcccagcgacaaatgtttcggtttgtgaatcaggcgcaacgttggtttcttgttgataccccggtttgttttcgccatccaccgatgtttcagcatattgggcgcgcacaaagttttgtttgatttctgctggtgagtaaggttgaatacttctgaaaagacgtgttttttcacgttgcacatcttctgccgtaaagttaaccggcacttccattgcaagcattccgatcacttgcatgatatggttttggaacatatcgcgcaaggcccccgatgtttcgtaatagccagcgcgttcttcaacccctactgattcagccaacgtaatttggacgttatcaatgaattgattattccatacaccactcaatagaccgttcccaaaacgcaaagcaacgatattttgaatcatctctttaccaaggtagtgatcaatccggtagatttggtcttcatcaaaggtttgcgtcaattcttggttaagcgccttagcactttcataatcgcgaccaaatggtttttcgataatcaaccggttaaagccatccgccgttaggagcgcttctgatccgagatgacttgcgattgtcccgaagaaccgtggtgacatggccatgtaataaatccgattttggtgtaattcgtattgttcatccaactgacttgctaaagcctttaatgtttcgtagtgcttggcgtccgtcacatcatgtgattgataatagaaatgacctacgaaagcttctttagttgcttgatcttcatcaaagttgtccaaagctgtcatgacgatttcgtgataatgatcatccgtccatggccgccgtgctgttccaatgacagcgaagtgttcttttaaataacccttccggtataaattaaataatgcggggtataatttccgttgggctaagtccccggaaccaccaaaaataataaagagtgctgctaaatctgtgtgcatatctcacaccactttcatataaattaattttgtggcgtcacaaagatgtgttgtgccgctttgaggccgatttggatttctgtttgactcgtattattaaaaacagtcaacggactttcgaagaggccaacctttttgagtgtcacactgtcaccgactgacaagccgatttccagtgtatattttaataagtcattatcatccaatacgcgatcgataatcgccgtttcacccacttgtaatgtttcaagtgcgatgtgactttgttgttcgaattcccccttggcattgggtataatcccaccatgcgggcaacgcgttggatgccccaagaaatcagctaaccgttcagccaagtcgtgattagtaacatgttcgagttgttctgcttctgggtgcaccgtattgaattgataatgtaacttgtcgactaaaaaaacttcccataaccgatgattgcgcactaatagggctgcttcgcgggcgccttcacttgttagttgaattccttggtaaggtgtgtggttgacgtagttttccttcactaacttattgaccatttccgtgactgatgccgccgaaacgttcaatcccgctagtatttccttattggtaactttctttgcgtcgccaccaagttcaaaaataatttttaaatagtcttctttattgggtgtcattgccatccagatccttaatcaagtttgtcgacaaacttttcttagttatccctgaactaaatgaatgtctactttctattatgccttatttgtaataattttcataccattaagcttcaatttagtcccttaaatagtaaaaaattaatctcttttcagcaacaaaaaaaggcggtagaccgatttgtttcagtctaccgccttaaatttgtggtcgggcttctcaaaccacttattctagcaaatcacttggtcaatttgctagaattctgcttcgagaatccctttcaattctttaattaatggttcttttggattggttaccgtacagttatcttcatatgccagttctgctaaatcatcaacgtggcgatcaaagtcggcctttgtcacgccattatcacgtaaacgcatcttgatgccgatactttccgccaatgcagtcacagcatctgcgtaagcggccaccagttcttcagtcgttttacctggtaaaccgagataacgtgcaatttcagcataatcttcatctgctctgaagtaactgtatttagcccagagtgcccgtttcgttggtgtcttagcattatagcgaatgacatgcggcattgtaatggcaatcatcaatccgtgcggcaaattgaacgcgccgcccagtttgtgcgccagtgaatggttgatacctaatagcgcattggcaaacgccattcccgccattgttgacgcatcatgcatattggctttagctgtcttatcgcccgcataactcgcttgtaagttatcaaacactaatttaatggcttgcaaactgagcccttttgtataatttgacgccatcgctgatacgtaactttcagtcgcgtggcataaaacgtccatcccagtatgcgcaaccacgcggggtggcacactttcgatgaattgactatccacaattgccacatctggtgttaacgcataatctgccaatggatatttgatgtgcgtttcactatcagtaatgaccgcaaacggcgttacttcagaacccgttccagaagtggttgggatacagattagtttcgtccgatcgaggtttgggaacttgtaagtccgtttccgaatatctaagaatttttgcttagcgccaaagaagtcggcatcttctgaatcatagaataaccacatccctttggccgcatccatgactgagcccccaccaatagcaacaattgtatcgggtttgaagcgtttcatcacttcggcgcctttataaatggtatcggttgatggatctggctcgacatcggcaaatacttggacctgcacttgatctgtgcggcgcgccaagacgtcttcaacaatttgcacgtaacctaagtcgaccatcccttgatcagcgacgataaaaaccttatgcaagtccgccattttttctaaatagttgactgaatttttttcaaaatagattttgctgggcaacttcacccattgcatgttattccggcgcttggttagcgtcttcacgttcaacaaatcgatcgttgaaacgttgtgggagattgagttatggccgtatgacccacagcctaaggttaatgatggtaacatgtcattgtataaatcaccaatcccaccttgtgctgatggtgtattcactaagacccggcatgctttcatccgttttgcaaattcgagtggtaaagcttcatccgttgtatgcaacgaagccgtatgcccaagaccaccaagatctagcattgcttcacagagttgcaagccatcttcgcgatctttagctttaatcatcgcaagtacgggtgataatttttcatgtgagagtggatattggtgtccaacacctttaatttcagcaattaaaactggcgtatcttctggaatatcgatcccagctagtttggcaattttagcagcagattggcctggaattgaaggtcggaccgcattcttatctgggtcgattactgcgtcattgagtgctgataattcgcttggtttagcgaagtaaaccccttgtgcttggaattccttcttcactgccgtataaatttcagcatcaacaattacggcttgttcagaagcacaaatcatcccgttatcaaatgatttcgagaggattaaatcattgacggcttgtttgatgttcgccgaagcttcgatatacgctggcgcattcccagccccaacccccagtgcgggtttaccagttgaataagcggctttcaccatcccaggaccaccagttgctaaaacagttgcgaccccttcatggttcattaaagcctgggtagctgcaatacttggttcttcgatatataagagtgcatctgctggcataccggctttaaccgctgcagctttaatgacattcaatgcttcagccgaacaacgttgcgcactaggatggaaagcaaagatgattggattccgcgttttaatcgcgatctcagctttaaaaatcgtcgtcgaggttggattcgtgactggtgttacaccagcaatgacaccaacgggttctgcaatcttagtgatgccatgttctggatcttcttcaatcacaccaactgttttattgtctttaatcgcattccaaatttcctcggttgcaaaaatattcttgatggctttatcttcataaatcccacggccagtttcttcaaccgccatcttagcgagtgccatatgttggtctaacccagcaatcgccatttgatggacaatattatcaatcttggcttgatcgaatgtttccaaaattgctaatgcccgttgtgcacgcgtcactaaatcggtgaccatttcattcactgtgttttcaaccgtttcaactgctgctttcttaaccatatcgattccctccatgccaattaactattgtgatttatttaacaaagttagtttagcgcattttgagttgtttgtaaactgttttgtgattataattacaaattttatttcttagttaaaggcgatttatcttttaaaagcctacatttgataataaatttactatataatgcaaataaaaaagcgctcggttgaagtattcaatcgagcgctctctgaattattttgtatcttcttttgtttcttcaaccgtttcttcttcaaccactgttgcggcttctgaagcagttggtgttactgtccggattgcgctcaagttaaacttgaggtaaacgccgtcacaatctaagacaacgattttagtatctgtattaacagaatcaatcacaccgtgtaaaccaccgattgtgatgactgcgtcgccttttttcatttggttcaccatttcttggtgtttttgttgttgtttcttttgtgggcgcattaccatgaaatacatcattgccatcattaaaattaagataacgaagaaactgggattaaaaccgccggcacctaacacaaagtttgccatttaaaaaacctcttttcaattttgtctattactaactctatcagacttatcaagcaacttccagtgattcactagaaattccgagtgttcttttcattgtaaccatattcttcgaagaacgcttctctgaattccaataaattatcttgttcgatggcatcttgcacttgatgcatcaaattaatcaagaagtataagttatggtaactcgtcaaatgaatcccaaacgtttcgtccgctttaatcaagtgccgaatgtaagcgcgggtgtagttcttgcagacataacaatcacacttaggatccaatgggcggaagtcttctgagtacttcgcattcttaaccactaatcggccttgtgaggtcatcgttgtcccattacgggcaatccgggttggcaacacgcaatcgaacatatcgacaccgcgaatcacaccatcgattaaggcatcaggcgaaccgacgcccatcaagtaccgtggtttgtcttcaggtaacattggtgttgtgaaatcaagcacgcgattcatttcgccttttgattcaccaactgataagccaccgattgaataaccggggaagtccatcccaactaaatcgcgcgcactttggcggcgtaagtcttcaaagccggccccttggacaatcccaaatagaccttgcgttgctgggttttgatgcgcaatcaagccccgttcagcccaacgtgatgtccgttcaactgattttttaacgtagtcataactttcaaagaatggtggacattcatcgaaactcatcatgatatcggcacccaaagcattttcgacttggattgctttttccggtgataagaacagtttttcgccgctcaaatgactcttgaaagcaaccccttcttcactgatatcccgtaatttcgcaagtgagaacacttggaaaccaccagaatcggttaacacaccgcggtcccagttcatgaacttatgaagaccaccggctttttcaacgatgtcttccccaggtcgtaaccagagatgataggtgttcgataaaataatgccggcacccatttcttttaattcttcaggcgccattgtcttaacactggcttgggtcccaacaggcataaacatgggtgttttaaacgtgccatgtggtgtcacaatttcaccaaggcgcgccccggtatgtttttctttcttgattagacgatacttgatcgctggttccatttaatcgactccaattctaggattattgttggttcagtaataattggtacgcatagcgtttcggtgacggatcgtttgcaatgaagatgtcaccacgatattgaaagcctactttttgaatcatatgttgcatcgccaagttatcagggtgcgtatcgatgcgtaaatcatgtgcgcctcgtaaactggcagcggtcaccaataaggttaaaaactgtgtcccgagatgttggccgtggaaggcactatcgagtgcgacgcggtgaattgaaaaataaggtgtcgaaccagattgccattgaccattggtaattgctgcatagccaggatcttcagttgctagaattgaggcaaccccaatcacctgttggtcagccatcagaatgtaacataattcttggtgaatctcgtcttcaaactgagtttgattaggttcacctgcttgccattgatttatctggcgattctttaaggcggcctttgcatgttcgataatctctaaaatccgcggtaaatctgtaaacgttgcttttctcaaatacatcaatgctgccacctcatttttgtcgaattatttaacaaacatggcatcgccgaagctaaagaaacgataccgttcatcaacagcgtgttgataagcatttaagatgttttcgcgaccggtaaatgaagcgaccaacatcactaaggttgattttggtaaatggaagttcgtgatgaatgcatcaacagctttccattgataaccaggtttgataaagattgatgtccagccactatcagctttgagttcaccatcaaacttcgtcgcaattgtttctagcgtccgaatgctggttgtccccgttgccacaatgcggccaccattttgtttgacttcattcaacgttgcagcagcttcttctgttaatcggtagaattcgctgtgcattttgtgatcttccacgttgtcttctgaaacaggtcggaaagttcccaaaccaacatgcaacgttaagtacacaagtttgatgcctttatcctgcactttttgcaagagttcttctgtccagtggaagccagcagttggtgcggcagctgaaccaggttctttagcataaaccgtttgatacatttctggatcatctaatttttctttgatgtatggtggtaatggcatttcacctaaagcttctagaatttgcatgaagatgccgtcatacttgaattcaatcatgcggccaccatgttcgagttccttggtcacaactgcttttaattgaccatcgccaaaaacgacttcggtaccaactttggcccggcgtgctggcttcatcaagacttcccattcatcgtcatgcgtgttgtttaaaagcaagacttcttcgtggccgcccgtatcaggtttcacaccatataaacgtgctggcaagacccgcgtattgttcatgacaactgcatcgccgggatttaattcatcgataatgtcgtagaaaactttatcttctagtgcgcctgttttgtgatccatcaccaataaacgagacgctgcccgttcaatcatcggtgtttgagcaattaattcttctggtaaattataatcaaaatcttctgttgaaaccattgtgtaacctctttctaattttctgaatagggaataccgagatgttcataaccagcgggcgtcacaacacgtccccgcggtgtccgttttaagaacccaatctgtaacaaatacggttcgtaaacggcttcgattgtttcattttcttcaccaatattagccgcaatcgtctttagaccgactggaccgccatgataatagtcaatcatcatctggagaatcttgcggtcaatactatctaagccacgtacatcgacttgtagttgactaagcgcatggtcggcaatcgcttgatcaattgccgcttggtccgccacttgagcgtaatcgcgaatccgttttaataagcggttcgcaatccgcggcgtcccccgcgaacgacgggcaatctcatgcgcgccttcttggacaatggccatgttaaagacatctgccgagcgttcaacgatatcgaccaaatcatcttcatcatagtatgccatatgttcgacgattccgaaacgatcacgtaacggtgccgacaataaaccggcccgagtcgttgcgccaatcaaggtaaacggtggcaatggaaaatgcaccgggtgcgcagttggcccttgtccgaccacgatatcgatgtagaaatcttccatcgccgaataaagtagttcttcgaccactttcggcaagcgatgaatttcatcgataaatagtacatcaccaggttgtaactcgttcaacaatgcgactaaatcgccaggccgttcaattgctggcccactcgtcgtccgaatctgaacatgcagttcattggcaatcaccatcgccaaggtcgtcttacctaaaccaggcgggccatataatagcacatggtccaacgactcttcccgctttttagcggcttcaatataaaccgccaactcatttttgacccggtcttgaccgatatattgcgcgaggacttgtggccgtaacgtcttttcaatacttgtttctgcgaaatcttcgttttctgcggaaacaattcgttcttctgccatccattagtcctcctttatttcttcattaataagcgtaaaccttcacgtaagtactgatccgtagtttgtgcattgaaatcagccagtgttttggtaatcgctttgacttcgcgggctgaatatccaagcgcggttaacgccgctaacgcatcgtttaattctggtgattcaccaggcgtaccaagatcgatagccgtttgaccagcgagcgtttcggtttgttccaaatcaccgagcttgccctttaaatctaagacaatttgttgggcagtcttcttgccaacccccgggaacttggtcaaatagctcacatcatcattcataatcgcttggattaacccagaatgatcgctattggctaagatggccaaggcactcttaggaccaattccagaaacactgattaatttttggaaaatttgcttttcatctagatcgtaaaaaccaaataacgtgatatccgtatcacgaaccgcttgatagacataaatctgaacgatatcggtcgttgattcggtgtaacgatacggattagcaacttgcaattgatagccgacgccttgaacttctaagacgacatagtacggactaaccgccgtcaccaaaccttttaaatattcatacataaatttacctactttacgagaacgtatatttgcttgttaaattgtaacataaaatccgaatcgtgaaacagccagcagccaaaaagcgtaaaagaagggcctaagtgacccacggccaactcaaaccctagcaattagtattcacgaatcttcggcggttggtaatccttgataaaggatgccatcacactgaacgaatcggtaaataagtatttttcaaaatcgacctgtgttaaaaaaccttcactgaccatgtgggctaaaaattgttgtaacaaatcataatagcctgcgacattataaaaaatgcagggaccattttgttgcccaattcgcgcccatgaaataacttcactcatttcttccagcgtaccgggaccacccggcaatgcgataaacacatctgccagttcaatcatcttggctttacgcgctgacatcgtatcaaccttaatcatttcggttaaacctggatggacgagttcttgctgactcataaaccctggcatgacgccgatcacttgtccatcatgggccaacaccgtatcggccacggtgcccattaaaccaacttgggcgccaccataaatcaagcgcgctttgcgctcagcaatccaagtgcccaacgccttagccgcttccgtgtagattattttattaccactactagcgccgcaataaacggcaatgttttgcgttgccattagtcagcctccttagcggttaacaaccgagccaccgtactgatgggcaagccaacaacattgtaaaagtcaccgttgattttctcaacgagcagacttccctgtccctgaataccataagcaccagccttatcccgatactcttcggtgtctaaatacgtttcaatcatttcatgacttaacggccagaacgtgacatcagtttggacaaccgttttgcggatttcaccatcaatggataaccaaacacctgtataagcttgatgcgtgctgccactcaattgccgtaacatctcggctgcatcttgacgatcatgtggcttaccgtaaatcgtgccctgaaaactgacaacagtatcagcactgagcacagtggcctgcggattcttttgggcgatggattcacccttaagttgcgccaacgtctgcacgtagtcagctggtgccgtcactggtacctggcgttcatcgattgttgcgggttgtacctcgaaatcaggcacgactttttgtaaaagttcgcggcgtcttggtgattgtgatgctaagataaacattattcgccctcccaactatggtgtggatcttgaatccgtttaaacatcttttctaaatctttttgcgtgtaatggattaaaacgggccggccatgtggacagttaaacggattttccgtctgtgccaaatcgactaacaacgctttagcctgcgcatcgtctaagtgatggtgcgccttgattgactgtttacagctgatcataatcgctgttttttcacggaaatgggcaatgtctaacttcccgttttccaatacagtgtcaatcatctcgcgaatcgttgcttcttcttggccttgcgcaatccacgtcggatgactatggataacaaaactattttggccgaagctctctagctgcacacccactgcggcaaggagttccttttgtgcttgaatcttaatcgcatcactattgggatattccaacacgagaggcaccaataaattctgggcgtcgttgctaacttcaccaattttttcgcgatagtattcatacttaatccgttcttgagcagcatgttgatctaagatgtaaaagccatcttcaccttctgctaataagaatgtattgtgcagttgtccaatatagcgtaacgctgggaaacgctcaatgggtgctgcatcatcttcaggttgttcaccaaacggatttccgatcgcctctgcttcgtacttatcatcccaccgggccaattgttggggttgttcaaatatcggcaggctatttaaattaggattagcagttggttctcgtttaaggggtgtttcggtttccgcaatttgcgctgccgcttgcatttcagttttaaccggcttttcaggaactgtttggggctgaattggccgcaccgtaccagtcgcattgcgccgttgactcgtaatttggtttaaatccatttgaagctggtccacatcgaccggtttcgtttgttttagattctgcactgcatcgggaattaaattctcggtgctgagtcgctcacgaattgctttttcaatcaacgccatcaaagcaggttccttactcaagcggacttcttgcttggtcggatggacattgacatcgattaacagtggatccatttgaatatttaaaacgacgactggataacggccgaccattaattttgaaccgtaacccttgataatcgccttattcaattgataattcttgatataacgaccattaatcaacactgaaatgtaattacgactggcccgcgttagtttcggtagcgatacatagccggttaatttaaaatcgagatcttctgcactgactggcaagagttgcttagccattgtaacgccatagatcccggcaatcgtctgttgtaaatcgttattacccgccgtttttaacagcaggtgatcatcattggttaacgtgaacgcaatctgaggatgactcatcgccaagcgattgacgatatcgatcacgtttgccaattcagtctggaacgtcttcacatatttcaagcgggctggcgtgttgaagaataaatcacgaaccgtgattgccgtcccagggcgaattggattagttttctgttcttctaagacgccacctttaaaatgagcaaatgtccctaacgaatcagcggttgccgtttcaatcgtcaaatcggacactgacgcgatactggctaacgcttcaccccgaaagccaagtgactgaattttgaaaagatcctggcgcgtggcaatcttacttgtcgcgtgtcgcttaaatgcagtgggtacatcttccggttcaatcccatcgccgttatcgatgacttgaatcaattgcaaaccagcctgttcaatcacgatgtcaatttgagtactattggcgtcaatcgcattttctgccaactctttgacaactgaagctggccgctcaattacttcgcccgccgcaatttggttacttaatatttctgacagttcatgaattttccccattagcgttctcctttttctgacgtgtgggtatttagtgctaaaacgtgcttttcaagctaactttctgcgcttagcgctgtgaatcaaatcatcgactgcgtcgctaattcgcttccctgtgctaatgctcaaaagttggacaagcttgaatacactcttatccgaaacgtgctttcatcaacaacttcttccgctttaccccacttgccaaatcggcgattacatcgccaattcgtcaagtgctgtaaatgctcagaagttacccgttgatgacgcactcttatttgtttaattccttttgccatttgtatagcatgtttagcgcgtctagtggtgtggcgctcattaagtcgaattgtttaaccgccgctaggactttagctgcttttggatccgcttgtggtgccacttctggttcgaatagtgaaatttgttcatccacttcttcaaccggttcagcagccggcgcgacagctgcctttggtttatcttctaattgatccaagatgacatctgcgcggttcaacaacggtgtcggcatccccgctaatttagccacgtgaatcccgtatgacttatcagctgggccagccagcatcttgtgtaaaaagactaactcgccattttcttcaactgccccgacgtggacgtttttcaatgcggttagtgaatccgctaagctggtcaattcgtgataatgcgttgaaaagagtgtcttggcatgcacgttgtcgtgaatgtattcaataatcgcttgggccaaggccattccatcataggtggctgttccgcgtccgatttcgtcaaagagaatcaagctattttgtgtcgcgttcataatcgcgcgattggcttccatcatttcgaccatgaaggtactttgaccggaaattaaatcatcggccgcaccaatgcgcgtaaagatctgatcaaaaatcggtaagttcgcagatttagccggtacaaaacatcccatctgcgccatgatgaccgtcaaagccagttgccgcatgtacgtactcttcccagacatattcggaccagtaattaagagcatatccgtatcggtgcccatttgaaccgcattgggaatgtatttttggcgaccgagcactttttcaaccactggatgacgcccatccactaaatcaatttcgcgactatcagtcattaatgtcggctgaacgtagtggtagttttcactgactacggcaaaactttgtaagacatcaagggccgccacacttttagcgagggtttgaagccgttcaatctccaacttaacggtttcgcgaacttgcgtgaataactcatattcaagcgcggttgagcgttcttcggcttctaaaatcaattgttctttcgcctttaattccggtgtaatgaaccgttcggcgttggttaaggtttgtttccgttcataacgcccttcaggtagcgcgtctaaattcgcacgtgtcacttcgatatagtaaccaaacacgcgattaaagccaatttttaaattatgaatcccggtaatttcgcgttctttagcttcaagttgtgctagccattgtttcccgttagacatcgcatcgcgataatcatctaatgtttcgttgtaacccgattgaataatcccaccgtcagtcactgaaattggcgcatcgggattgatggccgtttcaatgagctcgcgtacatcatcaaccggatcgagttggtctaacgcacggtcaaaggtctgatcgtcattaatgcccgttaaaatcgttttaatcgttggaatttgttccaaggaagtcttcaactgaattaaatcgcggccattaacactgccaaatgcgacccgacctgctagccgttctaggtcatacacttttgtgagggcgtcttgcaagtttgtccgttcaaaataatggttcatgaaactagcgacttggcgttgccggttttgaatcgcctttaaatccaataatggccgttctaaccattgttttaataaccggccacccattgccgtcttggtttcatccaataaccacaataatgtcccgctcttatgaccagtgcgtaaagaagccgttaattcaaggttcatcttcgcagaatggtctaattttaaatattgggatggctcgtactcttgggcccgttgtaaatgccctaaatggcgcttttgcgtcgttgccaaatacaagaccaattgtttaatcacggccagttcaaggggctgggagatgttttgtgaaacgaaactgacttcggccgttgcatcgccatcttcttgatacgacacgagaatttgttgttgaacaaacgcgtgcacaacctcactggcaacaccgtggttaatgacaacttctttggtttgtaaactcaacatttcgttgagcaataaatccaaactcgcaatctggctgactttcatctcaccagttgataaatcggtataagcaaagccaaactgatcgccatctgccaccactgctgttaagtaattattttgtttggcatggccggctttttcatccatcatcgttcctggtgtgaccagttgaatgacttcccgcttgaccatccctttagcggttttaggatcttccatttgttcacaaatagcaaccttgtaaccttgatcgactagaatatcgatgtaattttgggctgcgtggtgtggtaccccacacattggaattggatcatccgcatttttattgcgtgctgttagtgtgagttccaataattgtgaagctttgacagcatcatcattaaagagttcgtaaaaatcaccgaggcgataaaataaaaaagcgtccggatactgatccttgaccttttgatattgcgccatcattggcgtttctttcgttttttgtggcatgttgttaatccctctctcattgacgttgatctgctgctaaggtgcttaaaattgcgtataggggtgatctggtgaaatctggatcggtttaattgatttagcgtgacccgttttgtcatcaatttcaattaaacagccattcaattgacccggtccttcggtcactaattcaaaccgttctggccgttgtgttttaaaccgattaatgatcttttcgcgcttcacgcctagaatcccgttataagggccagtcatcccagcatccgttaaaacggctgtgccttcaggtaagacgcgcgcatcgtttgtttgcacatgtgtatgggtcccaactaacgctgaaatccggccatcaagataccaagcaagtgcgagtttttcactcgtcgtttcggcatgaaaatcaacgaagatacagttggtttctttactaatttcagccaccatttcatctaacatttcaaacggatcaattagtagttcattcatcaaggcgcgcccttgtaagttaatcacggctaatttggcttgattgacgttaatcattgtcatcccttgcccaggcgttcctttcggaaaattggccggccgcactaattttttagcatcgtcgatgaattctaaaatatcgcgcttattccaagtatgattgcccatcgtaatcgcatcggccccagcttgtaaaagattcttataatccttttgagtcatccccttaccatccgcgatgttttcgccgttgataatggtcacctgtggtttgtattgttgctttaatgctggtaggtaatcattgatcattttttgacccattgtgcccactgtatcaccaataaataaaattcgcatgttgcgccccttaatgttctttctcagactttgatatagcttctattgtagcaatttttgcccagaataaaaagttttgctgtacccgtagaaaaacaaaaaaagccccgcgcaccgaaaaggtgagcggggctgataatgtgcttttcaaaccatgttcctgcgtttagcctaattagccaaccaatcgacttcgtcgcttattcgtctaattttgctaatcctcagaacataatcggtttgaacacacttcttcttttaacgtgctttttgaaactgactcttgcgcttagctacaatttgcaaacgatcaactccgtcgctcattcacagatttaggctaatgctcaaagtcaaaccgtttcaaacacacttctcttctaacgtgcttttagttgcaccaacttccgcttaatctaaaattggcagtcatcccacaactcgggataactgccaattttgtattaatgctcggttgctaaacgcacttctttctttaacgcgctcctcgatcagtcttttccggttaactgcaaaatgagcatcatggcaagaaccgccacaatgcccattttactgttaatcctcaaagcctactcagatcgagtcgcacttctagtgttttaagtgataactatatgttgaaataataatgttttcgcggtttgcaaatgccgttcttagtcttagacttgattggttatgcaaaatgttttgccatggttttcttggtacgaattgtgggaccaagaccgtggttgtaaagttccgtttttgcgcattcttgctaacaatgtcaacaaagcgaacaattggtttttgaattgaccggtatgatgaatggacatcgacgaaccggacattcggaaaatcttccttgaattcagcttgaatttcacgttccttggctggattttcatccgttgagacatgcatcgcaatcacataatccccgattgattgtgcgtaatctagcgcaccacgggttacttgggtcacgttgctgaccaagacaatcacagttgaaccgtcataatcatgcaagacggcttctttagcactcacgcgtagttgaagcgccactttcttgtaatgatcatgaatcttatagaaaatccaaatcataacaggcatgatgatgaagaatggccagatatcaggtaagcgataaacgaagagaatgactaagatagcaaacgaaatcaaagcgccaacaaaattggcaattgatttaccaaaccaattctttggtcgttcgacccaccacttgcgcaacatcccagattgagaaagcgtaaatggaatgaacacaccaaccgcataaagtggaatcaagcgtgatgtatccccgttaaagatgaaaatcaatgccattgaaccaatcgccaatgtaataatcccgtttgaataacctaaacgatcgccacgatccatgtacatgtgtggcatatatttgtctttggctaaattatacgctaacactggaaaagcggagaatccagtattcgcagcgacggctaaaataaaggccgttgcaaattgcacaatatagaataaaaagcctttcccaaaggtgtgttgggccacttgtgatagaacagttactttttctgctggtacaatgccgtaccagtagtttaaaaatgtaatcccagcaaagaagaaacctaagatggctgccatgattgctaatgtttcagccgcgtttgttgcacgtggcttcttgaaaaatggtaccgcattactgatggcttcaaccccagttaatgatgatgaacctgatgagaaggctctaaaaatcaacgccatcgaaacacctggtacaacagccccaacggttgatgttgcgtggaacggaatcgcacctgtgaagatcttataacacccaacgatgatcattaaagtcatcatcaagacgaataagtaaacgggcaccattaaaaatgatgctgattcacgcatcccacgtagattcattcccatcaagatcaaaacgataatgaaggaaatccctacttgatgcccatacaatgccggaatggccgaggtgatcgcttccgcacccgcggaaatactaaccgcaacggttaacatgtaatccacaagcagtgaaccacctgccactaaaccagcatttttccccaaattttcactggaaacaacgtaggcgccaccaccacctggataggcgtggatcacttggcgatatgacaaagttaatgacaatagcaatacgagcacaaaggctgcgattggaattgaataccaaattgccgcggccgaaagggtcgtcaatacgatgacgatttcttctgtcccgtaggccactgatgacaatgcatcagaagatagcatcgctaacgctttaaagcgtcctaatttttgattaccctcatcggaagattttaacggtttcccgataaaaatccgttttaactgttgcatagcaatatgacccctttaaataatatttctaacataaaaagccctcatgtgaatatcattcgtcgcaatccacacagtgacttttgaatttctctataacttaaaaaaataattgccgtttattcaaacaaatcgtattctactatagttacgcatgaattactaccacaatttaaaaaagaactgaccaaggtaatcgaaacgcctcgattccttggtcagttcttattttttatgataaacgacgggcaaaatctggtttgtaatctgaaattttagtaattcgaactttatcgccaggttgtggtgcttggataaagtatccatccccaatgtagattgcgacatggtgggctgttccaacccctccccagaataataggtcgtttggttgtaattcattgagcggtacatctttgcctaacttactttgatcttgtgaaacacggggtaatttaatcccatttttagcgtaaacgtattgcactaagccagaacagtcaaatccttcgggtgtggtgccaccccaaacatagggtcgcctaaatatttaaccgcttcttggataatcttattattcattaaatccttgttaccagtaattaatgcggcacctgcatcactcgccgctttttgagcagccgcttgcgcctctaattctttcttgaacttcgtttgtagttgcgttaattggtcgttagcttgttgtttttgttgatctaagtccttaattgcagcatcattttcctgtgataatgataccagcttggcctgttgcgcttctaattcagtcttttgttcagctttttttcagctaatgaggccgtttcagcggcattatccgccttagcgtctaacagtcgattgatgattgaacctttttggaataaatcgctcaaactttggctcgacaataaactatcgatcatatcaagattaaaactgctatctcgtgtttgtaattgccgcagattaccttcaataatcgccacttgcttttgataatcagcagatgttttgctgaactcgtcttgtttttctttaatatccgcctgttttgcagtcatttgttcgttcaattgcgttgtttttaacgttaaattactaatattattattcaattcggatagatgatcttgtgctgtcttaatggcagtttgcatttcttcaggcgttgcttggaccgtttgtggtcgcgctaaaaagaagccacctaacattaaacaggttatcagtatccgccggtttcgaaaaatcattgtcaacacctccaactattattataccgcaatcaaaattaattaatagggttgcgcacaatttatatatgcgcattttttttgaaaaataaaaaagttccaaaacttttgccagttttggaactttggatttaatcgtgctttttggttataacgacttccgcttaactacaaaacgagcgttatggcaaaaaccgccataacgctcgtttttaggttaatgctcagaaccaacccgtttcaaacgcacttctttacatcataccgcccattgctgatgggtccatgcctgctgctggtgctgggttgtcttctggtttgtcagcaaccactgcttcagttgttaacattaaggccgccacactagctgcattttgtaatgctgaacgtgtcaccttagttggatctaagatgccggcttcaatcatattttcccagttgccgttggctgcattgtagccgacttcaactggttgtgatttaactttttcaacaattactgagccttcaagaccagcgttggttgcgatttgacgaacaggttcttccaatgcacgaagcacaatgttaatcccggtttgaacgtcgccttcttctttaagcgcagcaacactttcgatcacatcgattaatgctgtcccaccgccggcaacgtagccttcttcaacagctgcacgcgttgcgttcaaagcatcttcaatccgatatttttgttctttcaattctgtttctgtggcagcaccgactttaatcactgcaacgccaccagctaatttagccaagcgttcttgtaatttttcacggtcaaagtctgatgttgtttcagcaatttgtttcttgatgttttcaacccgttcagcgatggcatctttgctaccagcaccttcaacgattgttgtatcatcttttgtaacagttaccttaccagctgtccctaattgatcgatagttgtttctttcaattctagaccgaggtcacttgtaatcactgtggcacctgttaatgtggcgatatcttctaattgttccttacgacgatcaccaaaaccaggggcttttacagcaaccacgttgaatgtcccacgaatcttgttcaagacaagtgttggtaatgcttcgccatcaacatcatcagcgatgattaacaaggctttaccttcttgcacgattgattgtaaaagtggtaaaacatcttgaatatttgaaatctttttatctgtaattaagatatatgggttatctaggtcagcttccatcttatcgttatccgttaccatgtattgtgacaagtaaccacgatcgaattgcatcccttcaacaacgcttaattcagtatcaatcccttttgattcttcaactgtgatgaccccatcgttgccaactttttccattgcatcagcaattaaacgaccagtttcttcgttagctgatgaaacagcagccacttgggcaatggcatctttactttcgactttgtgtgaaatttcgtgtaacttcttaacagcttctttagttgctaattcaatcccacgacgaatcccaactgggttagcgccggctgtgacgttcttcatcccttcacgaataattgcttgagctaaaacagtagcagtagttgtcccatcaccagcgatgtcattcgtttttgaagccacttcagaaactaacttagcacccatattctcaaaatgatcttctaattcgattgctttagcgattgtcacaccatcattagtaatttctggtgaaccgtaagctttttccaaaacaacgttccggccttttggtcctaatgttgttttcactgtgttggctaattggtcaacccctgccaacatttttgaacgtgcgtcttctgaaaatttaagttcttttgccataatttattcacctcaaaaaatttttttgtttattattattcaacaatagccataatatctttagcatggagcactaaatattgttgaccttcatattcaacttctgaacctgcatatttatcgtaaataacttcatcgttttctttaatatcaagtggaattcgtttgccgtcacttgttaatgtgccggtaccaactgcgactactttgccggtttgtggtttttgtttagcattacttgccaaaacaatcccacctactgtttgttcttcttcgtctttaacggcgataatcacgcgatcttctaatggttttaacacttaaaatccctccatcaattttacttttttagcactctatcatctcaagtgctaatcacaatttttatcatagcattttttcagaacattgcaagtattatgctagcacttttgcaatttgaatgctaatacgctaagctattgtcacaacaacctttgaggagctttcacatgacgctatacaaacaaaatttttcaattatcattagctatttgttcattttattgattcctagtgcagtcgtccgttttggtcatctatctgcctcgttttttctaatcacaaccattgttgattgcctcggtgccgcctggttactctatcttaatcaacgcacacaagccaatgccattgagcagcggcctttcccactcaaacccattatcatttgggggttgtgtggcattgtactggtcttagtaattcagattctcgccggcttcattgaacaaaacattctccacatcactgccaaatcgctcaacaccatttcactgatgaccatgatgcaacaacaaccgtttcttattttagcaacgaccatcgccgcaccgattatggaagaaatcacgtttcgcaaagcaatctttggtggattagccagtcgcttaaaccgcattttagccgccatcatttcaagtttactgtttgcttttttacatcaggacgggcatttgttaatctacacggccatcggtcttttcctatgttggctgtaccgcaagacaggttcgattttcaccacaatcatcagccatgctgggatgaacctgatcgtcactttactgtatctcaatcgttaaaaaaagcgttcaaacaggcggctactacgagcaacttgtttaaacgctatttttattcttgattttgttcatcagtataattatcgaggaagtaaatcaaagtttgtagttctttagccaaatcaacattttgaatccgcacgtttgatggcacagaaattcgaattggcgtaaagttcataatccctttaatcccagcggccactaattcatcggtgacttcttgagcttcatcaattggcactgttaaaatgacaatctcgatctgttggttcttcaattgttcggccatctcgtccattgaatagacaggaacaccggtttgaattgttccaatcatttcgggtttaacatcaaatgctgcgctaatccgaatattattggtttgcttaaagttgtagttcaataaggcgtggcctaaattccccaccccaatcaatgcaacgtttgtcaatcgatcttggttcaaggtcttcttgaaaaaatctagcaacgaagcgacatcatagccataaccacgtttgcccagtgcaccgaaatatgaaaaatcacgacgaattgtcgcactatctactttaactgcttcagataatccagtagaggaaattttagttttccctgaattgttcaaaaagtttaaatagcggtaatataaaggcaatcgttttgcagttgctcttgggatattattctcaaccatttgaaacctcctttttgatttgcttgtgaaaatagtgtagtaccatactgaaatcatactgaattttcttgtgaaaagcaatatatttacaattttgactgtccatcgtttaaatctgttatgatagttgacagtagtattataaaaatgaacgtaattaactttaaaaaacaccgcacgaaaggatttttagccgtgatattattacaagttcaacaagtcgcacgcagttttggcggcgattaccttttcaaaaacgcacaactcgaagtacaagaccgcgcccgtgttgccctcgttggtccaaacggggctggtaaatcaaccttattaaaaatgattgccggcatcacaacgcctgatgaaggccaaatcattcttagcaaaaatgctcaagtcggttacttagcgcaagatagtggcttagactcaacccggacaatctatgcggagatgttaaccattttcgatgatctccgccaaatggaagcccaaatgcatgaactcgagaccgcaattgcggacacaaccattgaccatgctagcgaagaatatgcagccttactaaaacgatatgaccaagtccaacacgatttctctgaagctaatggttacggctatgaagccgaaatccgtggcgtcttacatggtttccaatttccagaagacacctttaaaaagccaatcagtacactatcgggaggcgaacgctcgcgactcgcacttgctaagttattgcttgagaaaaaagacgtccttattttggacgaaccaacgaaccatttagatatcgaaacactaacatggttggaaaattatttacaaacttatcccggtgccttgctcaccgtctcgcatgaccggtacttcttagataaaatcactaaagaagtctacgacatgagtcgccacacattgacccattataccggcaattacagccatttcttaagtttaaaagaagctaacctctcactcgaatggaaggcttatgaaaaacaacaagctgaaatcgataaacttcagacctttgttgataaaaacttagtgcgcgcaagtaccacgaaacaagcccaaagtcgccgccgtcaactcgaaaagatggataaattagaccggccgcaaaacgaagccggtaaaattcattttcatttcgaaagcgaacatccaagcggtaacgaagtattgcaagtaagcgatgccgctgtcggctattcccccgataaaatcatggtacaaccaatcaattttgaagtgaaccgccacgaacgcttagccatcatcggacctaacggaattggtaaatcgacccttctcaaaagtatcttgcaccaaattccgttcatcaaaggccatgaaaaagtcggtagtaacgtttcaatgggctactacgatcaagaacaacgcaatttacacactaacaaaaccgtcctcaacgaattatgggatgaacaccatacaacacctgaaaaggaaattcgcacactacttggtagtttcttattcaccggtgacgatgttttaaaggttgtgtcacaactcagtggtggtgaaaaagcccgcttactcttgacgaaactcgcgatgaaccatgacaatttcttaatcatggatgaaccaacgaaccatttggacattgatagcaaggaagtcttggaaaaagccctccgtgaattcgatggcaccgtcctcttcatttcccatgaccggtatttcatcaatcaagtcgccactggcattatcgaactatcagatactggtagcaaacgatacctcggtgattacgattactacctcgccaagaaagctgaagaaacagcttacgcagaagcagctagccaaaacagtgcaattatccaaccaagtgccaatgcacaagatgcctacaaagcaagtaaggaaaaccaacgtgcacaacggaaactagaacgcgaagttactgctttagaagaaaaaatggccgcactagagactaaggccaacgcaatccaagaacaaatgacccaagcagacgtaattactaaacccctcatgcttcaagaactacaacaagacctagaaaaagtccaagctgaactcgctcaaacagaatcagactgggaagaacaagcgatggcactagaagaactaacacaatagagtgcgtcaagagccggttatgctgcgagcatcagcctaacaaggcgaatgcttgctacaagcaatcgtttgacttgtgtagctaagcacagaaatatgcctgcaccacataaaaaagggtagcgatcaatatcgttgcccttttgcattttaattaatttgtttgccgaacggacttaacgataacgccgctagcttaaagtgttgccggccaaatggaatcccaataatcgtaattgataataatagcccccaaaagacatggctcgcccacatcacaagaccacctaagaaaaaccaaacaatgtttaataaaaacgaacctgcaccccccgttgaaacaacggttgcgttaaacggcatcaaggtcaatgcgccaatcttaaaacattgtagcccgactggaattccaataatcgtaatactccaggcaatccccagaataaaccaaccgatagcctctactaatcccccgaatagccaccaaattaatgtaccaattaaactcattgaataaactcctttatacttgattaccttaattatacctgattcataaacaaaaaaagcggtagccgcctaaaaataggtcgctaccgcttttcttaatctttttttaaccgattaatgctaacgcttgtttcaagacagtttcgccgtccatcatgccgtaagccttcatatcaattacttcaacaccgattccttttggtgccaatttttctttaaattgaccttccatgaaacgaacttgagggcctaatagtacgcagtcaatttttttagattcgagttggttgtctgcatctgaagcgccagttgcaaaaatttctgcgtctaaaccttgtgcttcagcggccttttgcatctttgaaactaataaacttgttgacatccctgctgcacaacataacatgattgttttttctgccataatgaattaccccttaaattttaattggttagaaagcgataaaaggcttataaaaagcgttttcatttcctctatgtttttagtataagcgctttctttattaatgtcaattaatgttatttaaaaatatataagccgcccattttgttgacctatcccaatcattaacctgtcacctgttattttatcgcatgaaaagtattttttatgctccctactaaacacaaaaaactgctaaccaatgcctaaaaatcgtcggttagcagcttttagctattttattgtttagtatagaatcgttttaattttgtctggcaacgcgattgtgcccgtttcatctgttcaaacgtgcaatctagctggctacacgcttgctcaactgctagttgccccgtcaaaacccgaaaggccactaactctaaagcagatagtgtctctaagtacgcccgcatttcaaccgttgactgatagtatgccacggtatcttcagcgagcgcattgcattccggacaacaatcaaataacagggcttgctgatcgacccgtcgtttctgagcaagttctttgcgaatcaagtttaatacgtggtggtgaaagcgtaatttataaaaaccaccaaaacttttgccgcaattttgatcataacactggcaagtctcataacagacgattcgcgcttcttgtaaccaatcgtcctcatcaaataagcgaatataatatggagtaaaggtgcgataaaccattggtaggtaggctttaaataaaacatccaacgcctcagaatcgttttcaaccaccgcttgaattaagtttgcatcacgttttgctaattccatcaatgaaccacctctcacgcaaccccacgcctttatcttaacaagttatcgtacatttattaagagaacgtttgtttaatcatctttttcagcacttagtgcatctcgcacctgtgcaagttgatctagttgcgccggattccacggcatatcccgttgcaaggtccgatcatgataatgcttggcatcatggtcaatttcacggtgcgttcggcgaatctcacgataaaaatcgtgcgaagacacccgcaatgcgccccgtgaaaaaatcgtccactgctcagcttgatcactcgaaaccaccgtcacttgcgtaatcggcgacattaatttacccgctaagccttcgatataactgtccgctgtttcatcctcatcggtgaagacaacttccaaattatactgcacataactttgtttaatccctggcacatacattgcatcaaatactaagatgacttcaatctcacgaaacttgcgatattctgataatatctgcaataagcgatcacgcgcatccgcgagatgatcattttgtttcaacttattcagctcgggccagttcccaatgatattataaccatctgcaattaagatctgttttttcatctgctacaccaaaggttgacggctattataagcctgatacattaaaacccccgcagcgacactcgcatttaaactttgcacatgaccgaccattggaatcgtcaacgtttgatcaacttcttttttaacaattggtgaaagccccttgccttcattaccaatgattaagccgattggtcctttagcatcccacttacgatagtcggtaccagccatatcggtgccaaaaatccaaagaccacggtccttcaatttcttaatttcttgtgttaagttcgtgacacgcgccactaggatatgttcgatcgcaccagtcgatgtcttagcaactgttgatgttaaccccaccgcacgatgcttaggaataataatcccatgcacaccaaccgcatcagctgtccgcatgattgaacccaagttgtggggatcttccaagttatccaagattaagataaacggttcttcttctcgggctttggccttagcgaaaatatcatcaacactcgcatattcaaacggtgcgattgctaagataatcccttggtgattttgacggtcactcaataagtccaacttatttttaggcacattttgaatgattagacgtttttctttcgctaatttcacaacatcgtggacaaagtcagccttcaagccatcttgtaagaaaattttattgattttcttcgcatcactggtcttcaatgtttctaaagaagcatgttttccgatgacgaaatcagtttgttcttcaacaactgcttcttcgacgggtgctgctggtttcttgttagctggacggcgcgttggctttgccgaattattggccgtccgacgactattgaattcgttgttcttttgtttgaatggttggttattattttttctcatgggtcctcccagcgtcgacttgttgaatacaccagtgggctaattcagcgacgcgctcttgttgttcagttaagtatagatagccaaaaactgcttcaaagcccgttgaggtccgataagtcgaaacactcgtattcttggctttcgtataacttttggcatttctaccgcgtttaaaaatattcatttcttcttctgttaaataattatcatcgatcatcaaaccaatcaaagcagcttgcgctttagccgacacataatgtgtcgccacttgttgcaagcgcgttggtttggttaaaccgagttctagcaaatgggcgcggacatacacttcgtaggctgaatcgcccatatatgccaacgcaatcccgtttagttgtaaagcatttttcatgcgcgtctccatctcattccttgtggtgtatcttccaaaataatcccttgttctttcaattgatcgcgaatcgcatcactgcgggcaaaatcctttgctgcccgtgcagctttgcgttcttcaatcaagctttcgacctctgcgtccaacagttgggccgccttaaactcaacaccaaaaatggctaacaagcgcgttagacgggcagttaaatccactaacgtaccagcttggacggtagcccgttccaggtattgattactaagcttagcgagttcatacaattctgttaacccgttttgcacgttaaaatcatcatccatcgctgtcacaaaggcgtcttccaagcttgccgcttgtgcggcaatgtctgcgtctgcgcccgcttcagcagtcgcttggcggaacgctaagttatcgagggccgtttttaaacgatccaggttcgtttgcgcttcagctaataatgattcactgtagcgaattggtcggcgatattgcgtgctactcatcaagaaacgtaatgcttgtggattaacttcttgaatcaaatcatgcaccgtcacgaagttgccaagagacttactcattttttgatcatcatccccgactgtcacaaagccattgtgcaaccaatagttgacgaaatgtttaccagtcttcgcttcactttgagcaatttcattttcatgatgtgggaactctaaatcttggccaccgccatgaatatcaatcgtgtcgcctaaatatttggtcgacatgactgaacattcgatatgccagcctggtcgccccttaccccaaggtgaatcccaagcaatatcggtccctttttctgacttccaaagggcaaagtcgattggatcttccttacgtagggtttcttcggttgctgtatgttcgctggccccttgttcgagctgatcgatatcttgaccagctagatggccatagtccttaaatttacgagcacgatagtaaacatcgccatcaacggcataggcataatctttagcaattaagtcttgaatgaacgcgataatttctggaatgttttctgtcgcccgcggattgagcgtcgctgtttcaatattaagtgcttgggtgtcttctttaaaagcggtgatatagcgttcagctaattccggaaccgtgatttgttctgcactcgcagccttaatcatcttgtcgtcaacatcggtaaaatttgagacataatcgacttgatagccacggtattcgagatagcggcgaatcgtatcaaaggcaatcgcactgcgcgcattaccaatatgaatatagttatacacagttggtccacagacatacattttaacgcggtctgcttgaatcggtttgaagacttctttttgacgcgtgagggtattataaacggttaacatcgaatcttcctttcttaaacgtgctcttgcaggcttatttctgcgcttaaccaaatttgcccaatcggcgattgcatcgccaattcgtcaaatccagttaatgctcaaaatataaccacctgctgtcgcactcttcttctaaacgtgctttttgaaactgacttctgtgctttgctccataccgcaaacgatcgccggtggcgctccctcacggtattaggcaaatgctcgaagtcaaaccgtttcaaacgcactcttccaaataaaaagcgtcctttgttggttaacaaaagacgccgattgagcgtggttccacttttctttgcaaaaatgccttgaacaggtaacggtgtcccggctaagtcacaaagtcacttggcatttcagaggtgcatttcgatggggcaatcggctttcttccagcaattcgaaagctctcttaacaattggcatcatctacttattctcttcatcaattttaacggtttagttggtctccatgatacagattattgacgaccgtgtaaagtgttctgcgtggctatttttctttcaagcctttttgttgatgcgctggtctagcaaaaatcatccgccccgcagcggtttgaagcgcacttgtcacaatcacttctagcggtttatttaagtaatgttggccatcttcaacaacgatcatcgtgccatcatcaagataggcaaccccttgttgccgttctgttccggctttcaccaccgtcacggtcatcgcttctccaggtaaaactgcaggcttcaacgtattggcgagttgattgatattgaagaccggtacgttttgaaattcacagaccttgttcaagttataatcattcgtcacgacaatcccatcaagtaattttgccaatttaacgagtttactatcgacttccgttaaatcctcgaaatcaccgtcgtacatttcaacagataagctatcgtctttttgaatatcgtttaagatatccagtccacggcgcccacgtgcccgcttcaaattatcagcggaatctgaaattaattgtagctcatgtaagacaaagtttggcaccatcaatgtgccttcgataaagcccgtcttagcaatttcttttattcggccgtcaataatcacacttgtatctagaatcttatacttacggaaattatcgccgactttacgttctaatacatcagcattgcgtttcttaggttgcatcaaacggcgccattcttccattcgcgttgtcccaattcgaaagccgagataccctaaagcaatcatcaataaaatgggtacaactgtatttaatgcaaaaatgggcatccggtatagcggaatcgaaacaacgtttgctaataacaatccaattagtgaaaaaacactcccaaataaaataaaactaggtgattgtttcgttaaggctttttcaagccggtgcatagctctcaacattggtgttgccagcgccaagaataatagatagaaaataatggcccctaaaatggcgttagtaataccgttattgagatacatcatgtcttccaaatgaactaatggccaaaatactgggaacgccgtaattccaagcgcacctcctaagataatgaacacaattcctaatattctttttttagtaaatcgtttttgttgcatcgttcaacctcctctcgctccaacttatgcctagttgaatactttctttaaagtttctgcaatcgtggtcacaccaatcacttgaatatccgtcggtgcgtcccacccttgtaagttattctttggtacataaatacgtttaaagcctaatttagcagcttcactgacgcgttgttcaatccggttgacccggcgaatttcaccagtcagaccgatttcaccgacgaaacaatcagttggtggaatttctttatcccgatagcttgatgcaatcgaaacagccatcgccaaatcaatcgcaggttcatctaatttaacaccgccagttgcttttaaatacgcatcttggttcgataacatgagactagcacgcttttcaagcaccgccataatcaaggagactcgattatgatctaaccctgaagacgtgcgctttgcattcccgaatagtgttggggtaattagggtctgtaactcgaccaagatgggtcgcgtgccttccatcgaaacaaccacggctgaacctgtcgcccctgccaaacgttcttctaggaaaatctcggatgggttcgcgacttcttttaagccggcttcacgcatttcgaaaatcccaatctcattggttgaaccaaaccggttcttaaccgagcgaagaatgcggtaagtatgatgcgtatccccttcaaagtacaacacagtatctaccatgtgctccaaaatcttaggaccggcaatagcgccctctttagtgacatgcccaaccacaaaaatcgtaatctggttcgtcttcgcaatgcgcatcaattcagcggtgacttgacgcacttgtgaaacactaccgactgcggaagtcacttctggttcgctcatcgtttgaattgaatcaatcaccacaaagtcgggtttcattgtttcaatctgatgccgaatattgcccatatccgtttcaggatataagtaaagttgatcgccattcacatcaagccggttagcccgcatcttaatctgggatgcactttcttcaccagaaacataaagaatcttaccaaccttttcaagttgtccggaaacttgtaggagtaacgttgatttcccaatcccaggatccccaccaattagaatcaatgagcccggtaccactccaccgccaagcacgcggttgagttcgtttaattcagttttaatacgcggttccttttgaatattaacagtgctgatttgttctggttcagttgcccgccctgaaatcgtaaaacttgatttcgcgctagctgcaggttgttcacgttcttcgaccatttggttccaagcgccacaattcgggcaccgacctaagaatctcggggaactatagccacaattttggcaaacaaactgagtcttaattttagccacaaagattctccttcattatcgagattagttttattttaacataagtttgtgaattttcggcgacctagcgattaccgtttagcgaccagatgagccaaacccacccgttcgtttggtggttaccgtcgcttcatcatctgcgactaaatatggcatgaagatgccttgtccaattcgttcaccttttttcaagataacatcccgcggactgaagttaaccatttggataaaaatttcaccttcgttggcatcattgccgtagtaatccgcatcgataatgccgacgccgttgggtaaaattaacccttttttgagtgggttgcttgaacgattggcgatcattaaatattcgtcgtcttgcatgtaagccttaatcccggtcggtactagaaagggtttcaacgtttttgatgcgcgttcaaaatcgtcatccactaacggtttgccatttcgaatcattcggaacaaacgcacaaagttgtaatgccagattgatggcaacacgaagtcctccgcacaagcaaagtcgtagcccgccgaatgcgctgttgaacgcaccggtaaactcaatcccgcctcttggtatttggtcacaatttcaaagccgcgttttttcattcctaaaactcctaatattatcgcccatttgggttctttttgtaccactgtatcataccatgaaaccgcggaggctgtgaataatgcctaaggctgatttaattaaaaatttaacaaaaagcgcccaattaaagcgtttttttcgtataatagatttattaatacaaaaggggtgtcttgatggataagaatgcaatgaaaaagatggcagctgaacgctcagtggattttgtcgaagataacatgattttaggactcggaacaggttcaacagtagtttacatggtggaagccctcgcaaaacgggtacaagcagaacacctcaacttaacatgtgtctgcacctcaattcgtactgaagaacaagccaaatcacttgggattccggtcaaagcactcaacgatgtcgaccacattgatttaaccatcgatggtgccgatgaagtcgatgccaacttccaagggattaaaggcggcggtgctgcgcacttattcgaaaaattagtcgcaactacttcaacccgcaacatttggattgtcgatcaagaaaaagtggtcgatacaatcggtcgcttcccactaccagttgaagtgattccatttggcagccaacaagtgttcaacaaaatggctaaagaaggcttaaatccagaattccggatgactgcagacggccaacacgtcttaactgattctaaaaactacgtcatcgatttacacctcaaccaagtccaacatccccacctactggcatcatggctcagtgaacaagtcggcgttgttgaacatggtctattcctagacatcgtcgaccaagtcgtggttggcgcacctgatggcgtgaagattttaacagcaaaataaagcgtgcgtttaaagcagatttgacactgtgcactagcacagtgttttaaatgaccgacaaaatcggtcgtttgcaatacgtagctaagcgcaagcgtcagctttaaaaagcacgtttccaaacgaaccctcagcggttcgtttttttgtgtcccgtgctctcatataaatcgttttctttcacatttatcaatcaccattcttttagctttatccccgttattcggtttacatctcccatctaatcaactagaattaaactaattcaaaaattaaggagtgattagatgacccaagaaattacacataataatttaatcaagatgcggaccgctttagctggcgtgccacaagcaacgacgctcaaaaatgctgtgatgacgaatggcattaacgccgttagtcaacgccccgatgctgccgtcacccttgatccaacctactcaatcgacctccccactggtgatgtcagctttcaaaaaaagagtgggcggtgctggttatttgccactctaaatacattacgccacgatttcgaacagaaatatcacgttaagaatttcgaactctcccaaaattatctatctttctgggatcgcatcgaaaaggcgaacctcttttatgaaaagattttagcaactgccgacaagccgattacggatcgcgaagtcgccttcaccctcgctggtcccgattttgacggtggccaatgggacaacgcagtggcactgattcaaaaatacggtgctgtgcccaagtcggtcatgcctgaaacttataacagtgacttaaccactgaattcaacagcactcttaatttgaaactgcgcaaagatgcgattcaattacggcaacttgttgctgacaacgctagcgaaacaaccatcagtgaaacgcggactggtttcttaagtgaaatctatcggctatgtgtttacgcattcggcgaaccagtcgaaacgtttgacttcacctatcgcgatgacgaccaaaattaccatgaagaccgcggtttaaccccgcaaagtttctatcaaaaatatctcaatcgcaactttgacgactacatcaccgttgtcagcagcccccaaacaagtaaacaatacaaccaactctacagtttagaatcgcaaaacacggtagtcgaaggtcacccaatgcgcctcttaaacttaccccctgaacgtttaaaagcactggctatccaatccttacaaaacggtgaaacaatttggtttggcaatgacgtgctcgcggatatggaccgacaaaaaggctggcttgatcgcaacctttacgactattctggactctttggtttcgatttgacgatgccaaaagaccaacgacttgactaccgacaaggcgttgtttcccacgcgatgaccctcaccggtgtcgacctcgtaaacgaccaaccaacgaaatggaaagtcgaaaacacatggagtgccaaagtcggtacaaaaggttacttcagtatgagcgacgcttggtttgacgactacgtttacgaggtaattgtcaaaaaagcgtaccttacaaaagaagaacaagccgcactcacaaaaaccccaattaagctagacccatgggacgcactgcaatagagtgcgtagtaagccgagtttatcctgaggattaacacagaacagcgaaggattgcgccagcaatcgtttgacgttcagggttaaccggaaggatatggcttacggagcacgtttcaaatcagagtgcgccatcaacgggttacttctgagcacttacagcacttgacgaattggcaatgcagtcgccgatttggcaagtgaggtaaggcggaagaagttgttgatgaaagcacgtttcaaaaaaataatgccattcaaaccgggtaatttaatttaacccaccaaattttagaggaggttttccacatggttcaacccattacagcaaaagatattcaacaattcaaagccgatttcaaggcaacaccacaatccaacacaattaaaaatgccattatgaataacggctttttagccacgagtgctaataccgattcaaaagccaaaatggcccccgttttttcaatcgacttagataccggtgccgtttccaatcaaaagcaatctggtcgttgctggatgttcgccgcgttaaatacaatgcgccacagcctccaagaccaattcaaaattaaggatttcgaattgtcccaaaactacaccaacttctgggacaaattcgaaaaatcaaactacttctacgaaaacgtcttgaagactgccagccaaccaattggcgaccgcaaagtcgacttcttaatgacaacgccccaacaagatggcggccaatgggacatgctctgcgcactcatcgaaaaatacgggattgtacctaagtcagtcatgcccgaaacatataatagtgaaaaatcaagcgaactcaacggcgttttgaaccttaaactccgtaaagatgccgttacattacgccaattagtagccgacggtgttagcgaagccgacatccaagctaaaaaagacgcgatgttaaccgaagtttaccggatgctcgtttatgcattgggcgaaccacccgttgaattcgactttgaataccgcgatgatgatcacaactatcacatcgaaaaaggcctcacaccgcaaacgttctatcaaaaatacgttggctgggacctcgaaaattacgtttcattgattaactcaccaactgccgacaaaccatacaaccacttatacagcgttgaaatgttgggcaatgtggtcggtggccgtgaagtgcggcatttaaacctcgacatcgacactttcaaacaactcgcgattaaacaactacaagcaggtgaatccgtttggttcggtagcgatgtaggccaatcatctgatcgcaaactcggcatcatggacactgaaatttatcaaaaagatgccatgctcggcatggatctttcaatttctaaaggcgaacgccttgattacggtgaaagtctcatgacccatgcgatggtcatcaccggtgtcgacctcgtcgatggtcaaccaaccaaatggaaggttgaaaactcatggggtgacaaagttgggacgaaaggttacttcgtcatgagtgatagttggtttgacgaatttgtttatcaaatcgtgatcaacaaacgcttcttaacggatgaaatgaaacgcattgaaacagaagaatacgatcacccaaccgttctcgcaccatgggatccaatgggcgcattagcaagtcgctaaacagtaaaaggggctgagacaaaagtaaattttgtctcagccccttttttgatattagaactttaatcgtctaaacgtgttcttataagtcatccccttccggctaatcctcagggtatcccgacttatggcacacgcttttttatgttccagtaccgactgcgagcaagctatcataataaatctgcatcatcatttgccagtcactgaattgaagccattcatcccctttatgggcaatccctttttgacctggaaatgatgggccaaacgcgatgatgttcggtaacgcgcgcgcataagtcacgcacgttgttgtgaccggtgtgccatccaaaccagtatctgccgcataaatcgcagagggttgttgaataaatggcaatgttggatcagtaacttgcgatggataacgccgtttaaccgtcaacgtcatccccggcaacatggcagctttaatcccagttaacaactgatcttccgtcactgggattgggtaacgacatgtcagatgcacacttaactgttgggcttcaatcgataccccataaaaagcaagttgcaatgctcctgatgcttcatcttgataattaatcccaaagttttccccagttgactgcgtcccgattttagcggctacccattgataaaattgacccgtttgaccagtgagttgacttgcatcggcaactaacttcggtaacacattatccaccatttcgggggcattgctaggtgcctttttgccgtgataagttttaaccgtgccatcggccaaaatcagctgtgcatgatctggcagataacttttagcgaaccgtccttcaatcgccgtaatttgttgctcagagccgtccgtaatcggtaacgctaactggacatctaacaagccccgttcgccgtagacggctggaaatttacaatctggtgtgaatccggcatatggtgcggaatgttccgccaaataaattggcatatcctgactcccagattcctcatcagtgccaaaaataattcggacgcgttgtttaaatgttatcttttgcgtcttaatcagatacagggcaaataatgtcgataaaagtggtcccttattatccaaaacaccacgcccatacagcatattatctacctgagtcagttcaaatggtggataatgccaatcatcttcaacatccacgacatctaaatgaccaagaatcccaaaataagttggcgcttgcgtttcgtctggtccatattctgcccagccaacacaattgccgacttgccccgtcctaaagcccattcgatcagcaatcgccaacactgtttccaatgcgcgtttcggaccaattccaaacggcgcttcaaacgtttgcgctccacacacactcggcacgcgtaacacttcccgcaagtccgctaagaactcatcagcatgtgcttgaaataatgccttaaaatctgctctaatcggtttcacaagaatggcttctttctattaaatttcgtcaaaattaatatcaacatcgtctaagccagccgcttcggcttcttccgccaaatactgccgatcaatcatcatgataaatggatagtaaattaaaattccaagcactaattcaaataattggaggactgaccctgtccaactcccagttgaaagccacccagaaataatcggtggtgttgtccatggcaacataacgccatttgtatacggtacccatccgagttggaatacaatccctgaaatcaatgtatttaaaaccggtacgataatgaatggaattgcaataattgggtttaaaacgactggcaaaccgaagataatcggttcgttaatcccgaaaataccggggacaattgccaacttacccaattctttgacgcgttttgacttgcagacgattaacatgacgattaagagtgagggggtactcccaccgccaccgtatgtggtgaagatgtcaataaattgttgggtgaaaatatgtggtaactgcgtatgattctggaatgctgttaagttatcttgcgtcagaacgaagaaaattggtgaccacacactgttggtgatagttggaccattaatcccaaaacaccagagcaacattgcgatgaagttataaagcaatacagatggtaatgagttgccggcaccttttaacggttgttgcagtaacgtgtagatgaaattgtaggccgtttcgaaactcgaaaggctaaaaccaattcgaattaagaagaaaactaataccactaagccagccggtagtaaggcatcgaatgattcactaactgcaggtggcacaccatctggcatcttaattcgccagttgcgtttaatcgcaaaacggtaaatttcaacactgactaatgcgataaaaatccctaggaaaatcccgttaggtcccaaatacattgtttgaatggcaccgattgattttttaccaacggtgacaacagtcggtgtcaaaattaagaatgaaataatagcaattgcactggtatgaatcgcttgtaaccctcggtttttaccataggcataggatatcccaaaacaagcaagcaaccctgtaaaactaaacactaaattagaaacagcactaaaccattctgtccagtgcggccctaaaatcccactccaaaattcagtccaaccaggaattggaaaattcccaatcagtaagaaaatcgatgtcacgataatcaatggcgtaatgattaagaaaccatctcgcaatgatcggagtacaacattattccccagtttaatcgtaaccggcatcaaaatctgttcgagtttcttttgcatcggttttgcctccttttaataacaatattggttaataaaatcagtaaaatcagcgccttcaaccttcattttgcataactgcaatgcgtggtcgattgaatccgaaagaccagtaccatccttttttggcatcttcacaatcgttatttgatcttgatactgttgaattaaatcggcattcttttcgatcgcggtcagcccaacaaccggaattgttgtttctttttgaatagtggctgctaattcacacgccatcgtcgaaaagtcccgataatcataggtcggtcccgcaatcacaacgtctgcacccattttctcactcatcttcgcaactttccgattcacttcggctttgttcgcctgataataatcagttccgcaataaaaggtcccgataatttcagagtccattttttttaatgccttatcgagcgtatccgcagcacccatcgctaatttttttccacctaaaggggtatcccctttttccttaccacctaatccagcttggatttgatccaacaagacaattactttcgtttaaaaccctccttttaatgttcacgttgcaagatgttatggaacgtgtatttatcagcacgataatgcgagttatcataaagaattggataaccgtccattgaatacgcaaccgtgtgggctagaaaagcgggttgccctggagaggtctcaagtaagtcacttaagcctttttccaatacgactgcttcgagttcttgattggcatacccgattgggattgtttgctcaatcaagcggtagagtgacccttgtgcctcatgggccgttaattctggtagaattttttgtttcagatagatttgttcgtgggtcatcgcttcaccgtctgccattcgcaagcgttcaatctgccaaactggctcctgtggtgctaaatctaacttggaggccacatagtccggataaacgattgtccggcgtaaatctaacacccgcgtgctgacatccaattgaaactgtttggctgcttcggtaaaaccaactaaaccagatgaaccactcgaaattttactttgtgttgcaagtacataggtgccacgatttcgatcgcgtaccacgacatgttgtttaaccaatagatcgattgctttgcgaattgttagccgcgtcgttgaaaattgattggctaaatccgtttccgatggtaatttctgatggatcccatagacccctttttgaatgtcatctcgtaaggcttctgcaatttcaacgtatagatacttaaccattccaaccacttcctctattcaactggtgctttaatccgtttcgcgtaggcttcaagccattctgctgaaatgggttcgatcaccgtcgtttgacttgaccctggattagccataaaaatttgtggtgccgcatcttgattgccagctgcaaacgtaaactcaacgttcgtcgccacgccccattcaccttgattatttaaggcaaccaacgaaaactcgccagctttgccgtagcgtttttttaatttctcaacaaacggatagactgcttgatcacacgctgcttgtggtgataaaccggtccccatcaggcgcacaatctcatatgaaagacagcccttcattaaatcttcgcctaacccagtagcggttgcgccaccgatttcgctatccacgtaaaagccactgccagataatgcagaatcaccagtccgccctggttttttcataaataatccagaagttgacgtccccgctgccataccggcagcttgatccaaactaaccatgccaactgtatcgtgaccatcatatgggctaagatttttttcgttaatttctttaattcgttgcatccagattttgtgtgcgcgttcggtcaacatattacggctttcaaaaccgttaaacatcgcatattgtgacgctcccgcaccaaccaagaaactattaaaatgatcgtcacttaattgacgcgcaactgagattgggttcttcacatcactaattcctgcaacagcaccaattgcaaaagtgttgccatccatgaatgccgcatccatctccactaagccttgcgcatttggcaaaccaccgtaactgaccggtttaaagaaggggtaatcttccacttttttgatagcggtttcaattgcatccgtactttgcccaccattttttaaatcagccatcgctttttgaatcccttcaaaggccattcgccaagtcccaatcattgcatatgtcataactctcatctccacacgtaagcgttttaataatcacggtataatcaaaattgtatatacaatcaatactttttttgaaataaaaaagccaccgcagtgacttttcatttaaagatagaggccaatcaacattcccactagccaaaaaccgttaaagacaattagattctgaaccgctgtaccaaatacaacgcgtttttcctgactcttctgtaatgcaaacccattacgtaacaaagttgggccactcgcaaaagctagcgctgctggccatggatataatttcaggccaatcccaacaataatcaccacgtaacaactatacgcactaagttgataaagttgaatgccgcgcttttgaccaatgtaactgattaatgtgtgccgcccattctctaaatcgactgtgtaatcacaaatattgttcattaacatcaaattagcaatcaggaagacagttggtaaactcgccacaaacaccaaaatcacattcagccaattcagttggaataacattaacggcccatcaaagcgcaaatcgaccaactgatccgccggaacgttgacatacaccgtcaaaaagaaattaccgaaccctaataccagactcgataacaactcacccagtggtaatcgtgaaatcgggaatgggccgtaagtatataaaatcccgattaagatgaacagaacactgacggctaacacaattaaatttgtgcgccagaccagaatcagccccagaacggttgccgtacttataaagccgatcaaccagcgtaaagcaaccttaggggcaatattttgtcgtcctaatgcactggttgattgctggagcgtttcatttttagcgaggtgaaagtcgttgtaattattccatcccgttgtgaagacatcaattaacaccaatgcacagaagtacaacacggtattgatcggatcaatttggtggaaataatacaacgtaaaaaagaacccagccataaagggaatcacgctaccaactttagtgcgtaattcgataaaatctaaaaacgccttaacagacatctattccgcctccgataacattcaatagtcctattctaacagagaatgtctaacaaataaaaaaagagtcggttggaacaaaagtaacttttgccctaaccgactctttcaacagccgaaatttgatcatctaaccatgttctatctgaacagatcgcatacgctgtttgattctattttgttttcaaatcttcaatcgaattaatattcgtcatatacttcggtacagctaaaccgaccttagcaccctctaagttcggacctaagtcttcaaactgacctttgtaatccttgtagtataaaccagaggtcttcggtaaccatgcggaaacttgtgcatcggctgctttagttgcgactgacgcccacatcggttgaatttccatagcttgaatcgttggttgataaccttgttgacgtaaaacttcagccaccacgttagttgacgcgatttctgaatcccaagccacataggttaacttaattttcgtgccatgaacctttttaacacccttagtccactcagcaactttttctggattgtcttgaatccaatcgcgcgccgccttttcaggttcaacaccgtcattgactttaagcattacggtcgacatttcctttggcgtccaatggaatcgatctaagatggtatatgcttctggcatatccttctttagccccttacgaacaaccgtattaatgtgttcagcttgaccaaaaacatttttggggtcttttaaaaacttgattggatatttagtaaacatccaatgtggttgccaaccagtaatgacgattgggcgtttatccgcaatcgctttgtctaacgtactggtcattgccgcagttgagctggtttgcaactgccagttctgatcattcaaatgatacttgttaattgcagtttgtgtggatgccataatcccagcacccgcgtcaattccggtaatcgtgtaattaatttgaccgcctaatttctcatcggtagcgtacggcttagtttgcgaactgcaggccgttagaagtgtgacgagccccactaaggtgaaaaaagctattaatttattcttcttaatcactgaatccctccttaatgtttacgttgccggttcaaagcttgggttaaacgatcaataataatcgctaagattacgattgccaagccggctgcaaaaccgcccccagcatcattccggccaacagcaaagtaaactcgtgttcctaagcccattgctccaatcattgacgcaatcacgaccattgataaggccaacatcatactttggttaaccccagccattaaggtcgatttcgccaatggtaattgaaccttaattaacttttgccattcagttgagccatatgaatcagaggcttcgatcaattcggttggcacttggcgaatcccaaggtttgtcatacgaaccgttggtggcatggcaaaaatcactgatgcgaaaacgcccgggaccatcccgataccaaagaaggcaacggctggaattaagtaaacaaatgccggcattgtctgcatgaaatctaagatgggtttaaatattgcctgggcaatatcgcttttggccatccaaattccaagtggcaccccaattacgagggaaatcagactcgaggttaacactaacgttaacgtttgcgtcatatcccgccagaaatcaaggttccaaatcaagagtaggccgaggacttcaaagataattaaaccccattttttggtgtcgcgattcgctaaataagtgacgccagcgataatcacgatgaataaccagatggggattaaatcaaacacccattggaaagcgttgataattccgccaataaaattcgttaaaccattaaaaaagccagtaaattgtgtcagccaatcgacaaagtgatccatccaattggcaattggtaatttagcaatcgtcattaaattaagcaaaatggttcacctcgtttcctgcaagtgcccctaagacggccccgcgaataataatcccacgtaattgttgcttatcatttaagacagcaaacggaatgcccgtttgcgaaatatcatctaagatatcagcaattggtgtctcttcatcggttgttggaacttcagtattcacgattgattgcaaatcacgactttctttgcggactaactcaagtacatcacgcgcatcaataatcccaactaactcacgtttactgttgacaacgtaagcattagaaacttcattttcacgcattcgttttaaggccaaacgagggccatctttttcaatattaacagtcgttgggcgaatcataacgttgccggccgtgtaaactttactacgatcaacgttttcgatgaatttctctacatactcgtcagcaggccgtgtcaagatatcttccggtgtcccggtttgaacgatttccccatccttcatgatcatgatgtggtcgccgattttgagcgcttcatttaaatcatggctaataaagataattgttttgtgcatcgtttcttgcaagtcgagtagttggtcttgcatgtcagaacgattcaatggatcaagcgcagaaaaagcttcgtccattaataaaatctcagcatcattcgctaatgcacgcgctaaaccaacccgttgttgcatcccaccagataattgtgtcggatactgatcgccataaccatttaaaccaactaaatcgagtgcttcattcgctttttgttcccgtgtcgccttatcaatgccttgaatttcaagcccataggctgtattttcaagaatcgttcgatttggaaagagcccaaaattttggaataccatgctcatctttttacgccggacttcacgtaatgccttcttatcaatctgcattaaatcctcgccatcgattaatacactaccttcagtaggctcaatcaaccggttgatcatccgaaccaatgttgatttaccactcccagatagtcccataatgacaaaaatctcgccagattctacttcgaagttagcccggtcgacaccgattgtcgcacctgtttcctttagaatcgctgcttttgattttccttgtttcagtaattctttggcacgcggcacgcgcttaccaaatatttttgttagatttttgacttgtaatttgacagtcatagaatccccctttgatttcattttctgaaaactatatctaaaaagtatacaggtttattgtgaaagttgcacaccgtccacttttattctcattttattctaatgtgatagttaggtaaccaactttctttaaaaattaaaaaatcgctagatggggctttatgttagtctttaaaaatcagattagttctaaaacggaaccaatctgaaaatgcaactattttcctttgtacattaaaattaaatgagaattaatcccttttaaaattcacaagcccttaattaggccatcaaaaaaagcgttgaccaaatcggtcaacgcttttaaaaaatttagccatgtactgcttttcgttgatagcgatgatacaaagcaagggccataatcgtaaagacaatcggaccaatgaccatccagaaggcatctaaatattgaccttctaacatcggttgaataatcgtaaaggcaattccgaagacaaggactaagtcgaccacaatcgtcaccgccttaacagcaactggtgatttaaagaattcgtaaggccgttccaaatctttgcgtgccttgaaatatggaaaggcagtcactaaaaagaggtatggcaacgatgttgaaacgttagacatcaaagtcaagacattatagaagtcaccggcagctttaccaccaaatgaaataaccgcgattaaaatgcagactaataatgcttgcgcccacattgctttttcaggcatgccatgcttgttaacttctgcaaagccgttcggccagagtgctttaggtgtcccgagtacaaatgactttaatggtgaataaatcaagacggcaaatgcgcctaagtaactgataaacatgattaaaccggtaatccgagcaaaggttgttccaatcgtcatcgcaacgggtgtcgtcatcccaaaggcatggccgaattgataacccaagttttgcataagaacataagtaatattgcccatgttagctctattcccgctcaagacttgttgccagttcgttgagatgccccacataaagattgcaaccgcgtagattaatgtaatgaagactgtcgcaatcattaaccctttagggaaagtcttttcaggctgatccatactatcggtaacaccgcccatggcttccatccccgcgtaagcaaagattgagaagacaacaaatgataacatcccaattggtgtttgatagctactcatcggactcttaacaaaggtcgtcgtcccatgaatcggttctgccaaatgaaaacccgttttaaaccaaatcgccacactaatcactaagaatgcggcgaataaaaaggcaacggccatcccactgaatgacgcaaacttttgaatcttatcaatcccacgacttgataggaaagttaataataaaatccaaagaattcctaagacaccgaccacttgagtgccattcatccctaataaatgccaggttgctgtttgatctgaaccttggaggaacgttgaaaacggcacccacactttagcagctgttgacaccatccagacaatccatgacgctaaccagatgaacgtcccgatgaaagccgcctttttaccaatggatgcttctaaccaagaatagatgcccccgcgtgattctttcaaagaagaaccaaattcagcaaacattaatgaagttggtaagaaaaagaaaattgccgctaagatataccaaataatgctggcatagcccattaagtagaaagcaattgtggtattcgcaaagccgaagattgacccaaaaatcatcaatacgagaccttgaacgttaattttttttgatttcgccatttcaataagtcctttataattgtattaagtagaataaatatacaattcaaagagcataatgtcaattatatttgaataaatcaaccgtttccagcctttttattcatgtattcataattatatacaatttacgccacaaaaaaagacgttcacttttagcgaacgtcgattgccttatttaatgttggcaaccttagcgactttgccactattgacactcgcgctaatttccccttcttgaccgttattgataacaaattgatcggttgcttgacaccgtgggcaagttgtttcaatttgaaacttggtagagccatctgaattatcttctagtgctgtcttcgtcgtgatttccatcgctggatgttggcacttatagcattgaaagacaataaaacgccgttctacaaattcatctgctaaactcatgtgattcatcctttcaactagcttatttaagttcattctagcagtctgctattttttagggtacctttttgctcacgtgtcgttttctgaaagcatcccttagaaatgaatcaaaaggcgaacgattttaaagtttaaaagcattatggtatgtgatatacttacaacacaccatctagaaggagaggtttaaaagtttgctaatcacactaaaagcaagttatttttctgcaaattcaccaaattctagttcatttcacgaagattcactgatagaaatcagtgataatggtcaaatcacaaacattattcatcaaacggcgtcagaatactctgagcgattatcagctgcacgccaacatgaccacttaatcacactcgctcccggacacttcttgttaccaggctttatcgatctacacaatcatgcgccacaatggccacaagctggaattgcccttgatcgccctttagctgattggctcaatcattatacctttcctcttgaagcgcgctacgccgatttagatttcgccacacctgtgtatcaagacttagtgaccgaaatgctcgctaacggcacaacaaccgccctatatttcggaacaattcacaattctgcgaatctacgactcgcagaaatttgttcccaagcagggcaacgggctttcatcggaactgttgcgatggataatccagatcaaacaccagactattatcgtgatgcttctcctgaagaagccattaataaaacacaaacttttgttcaagcaattcaagatacctatcgtaatgggttcattcaacccgtcattaccccccgcttcatccctagttgcacaactgaaacacttcagcaactcggtcaacttgcacagtcccaacacatcaccgttcagacacactgcagcgaaagcgactgggaacacgattatgtacgcgaacgttacggccatacagactctgagatgttgcaatcattcggattattgaatcaacattcggtattagcacatgcaacacaactgacaactactgaccaaagtatcattaaaaccgaacaagcagcgattgcgcactgccctatctcaaatgcctattttggtaacgggattctccccgcacacgagttacttaatcaaggcattaaaattgggcttggcagtgatatcgccggtggttatacccctagcttatatgccaatttgcaacaagccgtaacggcctcccaaattcgacaagacggggttgacgccaccattgcggctgaccaacgcggtgttgcgaacagtcggatcagtgctaaacaagctttttatatggcaaccgtcggtggtgcaactagtcttggcattcaagctggtgccattgaatcgggattgcttgctgatttccaaatcgttcaagcgccaccacgcttggcaagtcttacaccagatgaacaactcgaacaacttttattccgccacaccaaacaccaaattaaggccgtctacgttcaaggtaaactggtccacgaaaaggagcacaactggtatgaatgaacaatctcaaaaattaatggtcggtcctgacgagccgatttcgaatcaagaagctggcttcttaggactacaacacgttttagcaatggatgtctacgttccccccgttatcattgccggtttattggcgatgggtcttgatgcaaaagccggcttaattcaagcgacattccttgctgccgggattggtacgattcttcaaaccaaattttttatgaaaatgcctgtttcccaaggcccttcatttgttccaattggggcaatcgccgggatttactttgctagtggtgctaaagacggcgggatggcaacggtgattggcgcttcaattgtcggttcaattctgttaattcttctcggcgtcaccggcctcttccaaaaaattattaacagcttagtcccccaagtcgtcggtggcacaatcatcaccatcgttggtctttcactgatgccatctgctttaggtgataacattttcaaagcacagggcaatatcaatgagaacttactcctggctgttgtgaccgtcgccattctaattctttgtgtttcgctaggtatctacttccctaaattacaaaaactcttcaaagttagttccatcatcatcgccttattaggcggaactgttttagcaaccatgcttggtaaatttgactggcaaagtgtgaacgaagcgagttggtttagcttgccaagtttcaccgcattccactatggtatgcacttttcgatgacagcaatcatgaccttcgtcattatctacgccgttttaatgaccgaaacgaccgggacctggtttgcaatgagtgccgttacggattcgcccatcagtaagaaacaatggaatcacgggattatcggtgaaggaattagctgtttaatcgctgcactcttaggcggctcaccagttacagggtatgcaactaacgccggcattatttcaatcaccggtgttgctagtaaaaaagtattcgtttctgccgggatttggtttatcatcttcggcttctttaataaattagcggccttcttatcagcgattccagccccagttattggtgggattttcgccatcatttgttcaactatcatgctcaacgggttaaatgttattcgcacactacacacccaagaacgtgatatgtacatcatcggaattccaatcattctatgtatcgccatcatcatcatgccacaatcattggtgaaagcaacgcctcaaatgatccaatacttacttgaatcaccaatttcgatttgtgcgcttgccgcaattattctcaacttaatcttaccaagagacagacaaattgcgtttaattagactgaaataaaaagaagccccctgataaaaaagtttatcagggggcttcttttttcgtaaatgtatttcccgattgagacagcacactttttttaaacgtgctccagcaggcatattcctgtgcttaaccaaacttgtcgcatcggcgattgcagacaaatccagttaatactcgaaatataaacgcctgcttgcgcactcttttagacactgaccattcgaatcgtcatgatgttcttattcatcgagatatcttccacaatttctgcatattgcatttcccggggaatttcgatgcgatagacgttagtgtaaatcgtatcacgttcgttttgcgttactgagaagttcacatcgcgaatttgaatctgatgttgttcaaaatagctctgaataaactccttggtttccaatttatgcttatacttaatttcgatttttttcaacgtattgatgtgaataatctttttcaagaagacaatcacgaaaatgacaaagaccgcactgatcaccgcaatttgatagtagcccatcccaattgcaagtcctaatcccgcagtagcccaaagtgaggccgccgtcgtcaatccttgaatcttgtggcgggtgacaataatcgttccagctcctaaaaaaccaatcccactgacaacttgtgcaatcagccgcgcttgatcagaacgaatagtggtactaatcgcactatgcgctaatgcaaattgaacgttttgcgctgcgatttcctgctgaatcatcgcaatcacacacgcaccaatgcagaccagaatgtgtgtccgcattccggctgggcggttcttatattcccgatcagatccgataatcccagcaattaaggttgccagtagcagtcgaataatgatatgcacactcgttacttcaaacaataaaatccctcccaaataataccttatctctagtctagcataccgaacaaaaaaagcgctcgtcaatccatatcaatttacggattaacgagcacctattcattagccaactaggccgattgtttgtagaatcaaatagatatttaaaagcgtcaacacaattgtgacaaaccatgccgtatatttcacccaagggcggttaacgaatgggcccatgattttttcatcactcgtgaacattgtcaatggaatcatcgagactggcaatgcaacactcaagaagacttgtgagtaaatcaagaggttttcaacttgtgcttcgttcccatggtagtaaaccgtgaaaataataacaggtaagattgataacccacgggtaatcacccgtcgtgcccacaatggaatcttcatgcgaacgaaaccttccatgacgatttgtcctgaaagtgtccctgtgatggttgaattttgaccagaagctaataaagcaacggcaaagagtaaactcaacattgggctagcaatgctcccaacaatttctttgttttgtaaagcattgaataagtcaacgaatcgtcctaaatcactgttagttccaaagaacattgctgcccctaaaactaagagtaaacagttaacgataaatgcgactgataattgaatgtttgaatcaatgactgtaaacttgattgctttcttcttttccgcgtaatcgtcacggtcatattgacgtgcttgtgcgattgacgaatgcaagtagagattatgcggcataacagttgccccgacaatccctaatgccaagaatagcatcttctggttggtaacaatccgtgtacttggtacaaatccgcgcattacgtcgcccatatttggttgcgctagaatcacttcgtataagaaaacgaataaaataacggccaccaaggttgcgacaatcgcttcgatcttccggaaaccaagtttcattaatagtaataatagcaagacgtcaaatgcggtaattaagacaccccagagcaatgggatgttgaaaatcagttctaacgcaattgcggaaccaataatttcggcgatgtcggtcgccataattgctaattcggtgacaatccagaggaaaatccccatctttttaccggttttggcccgcgtcatctgcgctaaatccattccggtcacaattcctaaacgcgctgccattgcttgtaataacatcgcaattaagtttgatactaggatcacactgatcaaggtgtatgcgtattgcgcaccaccggcgattgacgtgatccagttccctggatccatataaccaacggccactaacgcaccaggtcccataaaggccatcaacgtccgccaaaaaccagcgttcttgggaatcgcaaccgtgttattaatttcttcaagactcgtgccatcagcatagtgtatgaatttctcatgcttttgttgattaagttcacccttttgtgaatcttctcgctgcttcttatccatataagtacctctttctcttcgattgagtcgttcaactattaggattcaatgactttgattttaggatgacctaactctgatcgtctccagtgttcaaattaatccttacccattctatcatatctctttgatgttgtccctgaacaagattaaaaaaaagctgtttctcagcgtttttttaagtaaccgattacaaataattgcccaccttaagtgctattaaaaatgacgttgcctgtctttaacagccaacgtcatttaacttttatttagacgactaaacttaatagtaaaacgccaattaacccaacaatcgaaatcaatgtttccaaaactgtccaagttgcaagggtttctttgacacttaaatcaaagtattccttgaacatccagaacccggcatcattcacgtgggaagccgctaaactgccggctccaattgaaaggaccatcagtgcagggttcacaccggctgattgcattagtggtaagaccaagcctgccgccgtcaatgacgcaacagttgctgaacccaatgccacccgtaagacaactgcgattaaccaacctaataatagtggtgataaattggcatttgcgaataatttagtgacactatcgccaaccccaccgtcgatgaggatttgtttaaacgcaccacccccaccaatgactaggagtgacatcgcgattgatttaacggcttcttcaatcgtcttcataatcgctagggttttaatccgacgcgcccaacccatcgtatacatcgcaaccatcaatgaaatggtcattgcaatggctggtgtcccgataaaaccgacgattgaatccagcatcgttggatttttaggtaatttcccgccgttaaaggccatttgataaatcgtggtgacagccatcaaaatgactgggaataatgaggttatgacactaattccaaaccccggtgtttcgtctaatttaaaggttttctgaggcccaagtgccgtcagattaccttggcgcgcgaacgcatctggtactaagcgttttgcaatcctagtgaataatggaccggcaataatcactgaagggatcgcaattaagaccccatataacaatacgtgaccagcatttgcccctaaagctgaggtaattgctgttggtgctggatggggtggcaagaacccatgtgtgacagaaagtgctgcagccatcggaattccaaggtacaaaattgacacacttacttcgattgcaatcgcgaaaacgattggtactaacaagaccatcccaacttcaaagaataaggcaatcccaatgatgaacgaagccaacataattgcaatttgaagtcttttttaccgaacatatcgattaaggtatgcgcgattctaaacgcgccaccagcgtcggcaactaaccgccccatcatggcaccaaagccaaagacaattgagagctcaccaagttgaccgccaatcccgttttgaacactggttgcaatgtccgttaatggcatacctaggccaaccccaacggccattgccgttataactaaagcgataaacgtattgatcttaaatcgaataataagggcgagtaataagataatgcccaataataggactactaatgccataattttccctattttcaataatgtttgcgctatcatgatattgttaaaagtaactgggctttcagacccagttcacttcgttactctttaacttgcatatgtttgcgttggaagtcagcaattgcgccgtattccgtatttaattcccgtgttaatcgaatccagattggtaatagttcgcgataaacttcaaagttggcttcttctggatgatgcacattcgtcacaccaaccatttctttgacagctgatagatcatccactaagcctaaactatacatccctaagacagcagcacctaaacatgagctttcgaaactctctggaatcgtgacgtcttgttcaaagacatccgccaacatttggcgccataattctgaacgggagaagccacccgttgcctgaatactctttggtttacctgccacaccttcaatcatcagcatcaccatgtataagttataaacgatgccttcaagcgctgcacgcaccatgtgcgcccgcgtatgttgccgcgtcaaaccgaagtatgatccacgtgcatctgcatcccagattggtgcccgttcgccacccaagtaaggatggaataagagtccatctgaaccagccggaatttctgccgcaatttgtgtcaaaatatcgtatgttgaaacatgcatttgttcagccttgattttttcaggtgcaaaaagttgatcgcgcacccaacggaagacaattcccccgttattgactggtccaccgaccacccatttatccttggttaaggcgtaacagaataatttaccgtttggatcaaccactggatgatcaacaaccactcgcacggcaccgcttgtcccgatagtaacggcgactacgcctggatcaattgcatttaccccaaggtttgataaaaccccatcgctggcgccaaagataaatggtacttcagcaccaatgccggttaattcaccatagatcggatcaatccctttaacataatccgttggttcgactaattcaggtagttgttggcgtgtgacaccagccacttcaagggcttgttgatcccaatctaaattaaaaatgttgaacaagccggttgctgaagcgattgaataatccatttgatacgtatggaaaagtttttggaagacatacgttttaatatcgatgaattgactagcttggttgaacaattcaggttgcgcttctttcagccaaatcagttttgaaagtggcgccatcggatggattggtgtgccagtgtgttgataaatggcttggcccaacccattttctttcaattgttgacttgctttagcagctctattatccgcccaagtaattgcccgagttagcggttgatcatttgcatccatcagaatcaagctgtgcatcgcagccgagaaactaacgccctgtaattcgccggcttgaacgttgcccttgcgcatcacctgtcgtaatacttctgacactgcattaaaaatttcatccggatcttcttctgccatatcgggtacggtttgatataaaggataaccaacgtttgcgtaagctttaacattcccttttaaatcatataaaaccgctttcgtacttgttgttccaatatccgcaccaatcatatatttcatcataattacctcgtttatgtggtgtttactgactacttactaggataccacttatttcttatcaactgcatggccgccgaattcatttcgtaaagcagcgacaactttaccagtgaatgtatcatcttcaagtgaacgataccgcatcatcaatgataaaccaatgaccggtgttgggacttgtaatttcaaggcttcatctaatgtccattttccttcacctgatgagtgcatgataccttttaagccttctaagttagggtcttttgcaaaagcagattccgctaattccatcaaccagccgcgaatcacagaaccattactccaaaccttagcaaccgcttcgttatcatattcaaactcaccatgtgataacacatcgaatccttcagcgatagattgcatcatgccgtattcaattccattatgcaccattttgagataatgaccactaccagccttcccggtatagagatagccatctttttgagcaatatctttaaaaatcggttcaatctgtttgaagacttccgcgctgtcaccgccgatcatgaagtttccgtctgcgttagcaccgctcatcccaccagaagttccgacatcgaagaaatgaatcccttttgcggcaagcaatgcattgtgttgtttagaatcttcgaaaaatgaattaccaccatcaatgacaatgtcaccggctgtcaatttggtacttaacgtttcgattgtggcttgtgttggcttaccagcaggtaacatgctccacacaattttaggttgtggcaattgtgccaccacatcatcaatatcctttgcaggtaatgcacctaagcgggttgcttcttgaaccgctgcttcatttaagtcaaaggcgacaacctcgtgcccattacgtcgtaagttagcgaccaagttaatccccattttgcctaaaccaatcattgctaatttcatctttgctagtccccttatccacaatttcatgtcacttttattaatgtctttattatatgtaaattattttcttcaatcaacccttttcgagaaaataattttctttgttgttttttatgctatactatcgataacaggggggcacttcaatgacacaaaacatcgattccttactccgtgcgtactacacgaatttaagtgaaaaatacaaacaaatcgcagattacatcttaaaaactgaacatttcaatcaaagtttaacgattcaagaatttgcggctgactgtggtgtttcaacagccactatttcccgtttcgccaaaatgttgaccttcgcaaacttccaggcactcaaaatggcgttacttgctaaacaagcaaccccaacagataatccactcttccatgaaattagtaataatgatgactatctgaccatggccgataaaattttcgcatccaatactaacgcgctcaaagcaactcgttcactactgactgaagcacaattacggcaagccgttgattatatcaaccaggccaagcacttaagtttatttggcttgggcgcttctggaatcgtcgctcaagatggctaccacaaatttttacgaattgcgattccaactgtttacagccaagactaccatctacaattgatgcaggccacccaactcaccgaacaagactgtgcgctgattatttcacatagtggtcaaaataaagatgctttagaaattgcacgcatcttaaaagaacgtcacgttccactgattgtcatcaccagttttggcaattcaaccctcgctaaattgggtgatgtgacactgttgtccatttccgaagaaaccaattaccgcgccgaagcactacacgcgttaattgcacaaatcagcatcgtcgatagtctgtttatgatggtcgccgttaataatggcccacaaacagaacaaagtttcaaagccattcggactgaaattgatcggactagacaaaaataaaaaagctgaggttgaagaaatacttcaacctcagcttttttgctgttctattttgaacgtttaaacgtgctttctcgaactgacttttccagttaactaaaaaattggtagtcatcctgaattctggataactcaattttttattaatgctcagttgctgaacgcaaccaaacgcactctattcctaaacgtgcttttttaaacagctccctgcgcttaaccaaatttgccaaatcgccgattgcatcggcaattcgtcaaatcctgttaatgctcagaagctacccgtttcaaacgcactctatttaatttctgctaatgtcttttcaaggtgggctaggacacggtctttacctaacaattcgattgaatcaggtaatgatggaccatgcatttcgcgggtcgttgcaatccgaattggcatgtacaattgacggcctttaatcttcgtatctttttggatgcctttaatgatttgcataatccgtggtgctgtgaataatgttaaatctttcaagcgttcgctgaattccttcaaaacaacgggtgctgtttcgttatttaattcttcaagcgcttcggcgtctaattgttcaggttcttcaaagaagacatctgacatttcaacgatttgagctgtgtagctcatttgatcttggtataacgcaatcaaatgacgggcccattcgatcgttttgctatcaggattttcagcgattttacccgctttaatcaagctttctaacgaaagatccatgattttgtttggatctgattgtttaacgtattggttattcacccattcgagtttcttttgatcgaaactcgctggtgatttgctcaaacgttttggatcaaattgtttgatgaattcttggcgattgaacaattcgctttcgccaactggtgaccaacctaatagggcgataaagttaaacatcgcttctggtaagtaacccaattcgcggtattgttcgataaattgaagcactgattcatcacgtttacttaacttcttacctgtttcagtattgatgatcaatgtcatgtggccaaagactggtggttcccaaccaaaggcttcgtagacagccaattgttttggcgtgttggcgatatgatcgtccccacgcaagacatgggtgatttccatcaagtgatcatcaacgacaacggcaaagttatatgttggcatcccatcgcgtttcatgatgacaaagtcgccacctaaacgatctgattcaaagctgatttcacctttaacaatgtcatcaaacttgtaaacgtgatccttaggaagacgtaaacgaacaactggttgtaagccttttgctttagcagcttcttggctagccttaatttcatcatcactcataccttcgtattcgtagatgtaacgtggtgcttcgccagctgctttttgggcttcccgttcttcagttaattcatcttctgttttgtatgattcgtaagctaatcccttagccactaactcttcaattaaaggcgtgtaaatttcgcgacgttctgattgacgataaggaccaaagtcaccaggcttatctggaccttcatcccaatccatacctagccacttcaaattatctaactgactgttttcaccgtcagcaatgtttcttttcgtgtcagtatcttcaatccgaatcacgaaagtccctttgttgtgacgtgcaaataaatagttaaacaatgctgtacgagcattcccgatgtgcaaatgacctgttggacttggcgcataccgcactcggattttattttttgccataaaaaaaacgcctctttctaaaattatacttgtctactagtttaccgttattatgcctaaaaataaaggctcagagaccactaatccacaaaaaaagaatctaggacaaaagtatgtttgtcccagacccttcttctgatagtagaattctatcatttaaacgtgctttttgaaccatcttcctgcgcttaaccaaatttgccaaatcgacgattacatcgtcaattcgtcaaatccagttaatgctcagaagataaccagttcaaacgcactcttccacttaaacgtgcttacactaactgcctcctgcgccttgctacatcagtcacatcaccggctttaccggcaatccgcctgattaggcaaatgcttaaaagcaaaccgttagtgacgcactctcaccgcattaacggagtggtgtccattgccattcttcaacttctggtaaatcagtaccttcattgcgaatgtattgattgtgtttagcaaccatgtcatccattgattgtgcgaattgaccagcttgatcaccaagtacgtcacctgcaacttctttagatagactgaaacgatccatttgattcaagacacgcatgtcgaatggtgttgtaatatcaccattttcacggtagccatgaacatgaaggttatggttgtgacggtcaaagaagatatcacgtactaagccttcgaaaccatggaatgcgaagaccactggtttgtcttttgtaaagtacatgtcgaattcttcatctgttaaaccacgagggtccactttaggtgaacgaagtttcaataaatcaacaacgttaatgaaacgaatcttcatgtcaggatattgtttgtgcaagattgagattgcagccaaactttcaagtgttggttctgtcccagcagctgcaatcacaacatctggttcagcatcttggtctgtacttgcccagtcaataatcttcaaaccattcttaactaagactgttgcttcgtcaattgagaaccattgttgacgtgggtgttttgaagcaaccactaaattgatcttttcttggctcttgaagacagtatccattgttgctaacaacgtgttagcatcagcaggtaagtattcacgaatgaattcaggtttcttttcagctaagtgtgttaagatacctggatcttgatgtgtgtaaccattgtgatcttgttggaaaacagttgatgtggcaatcacgttcaatgaaggatacttgttacgccatgcttgttcatcagccttacgtaaccacttgaagtgttgtgttaacattgaatccacaacgcgcaagaatgattcgtaacttgcaaagaaaccatgacgaccagttaggacataaccttctaaccaaccttcagcttgatgttctgataattgtgaatcaagaacacggccttctgttgccatgtattgatcgtttggttctttgattgattccatccattgacggtttgttgcttcaaaaatatggttcaaacggtttgacattgtttcatcagggccgaagattctgaagtttttattttgatcgttgtctttgatgatatcacgaacatattcgcctaaaacaatcatgtcttgcgcaacgactttaccgtgttctgaattatccacagcataatcacggtaatctggtaagcgtaatggtttaggatcaatcccaccattggtgattgggttagcagccatccgttgatcgcctttaggtgcaatttctgcgatttcaggttttaattgacctgcttctgtaaacaattcttctggacggtatgatttcatccaatctactaatgcatcaacatgttgcatgtcagcactgtcaattggcactggaatttggtgcgcacggaatgaattttcgattggtacgccatcccatgtcttaggaccagtccaacccttaggtgcgcggaagacgatcattggccatactggacgagatgaatcgccgttttcacgcgcattcttttgaattgcttggattttttcgatggcttcatccattgcagcagcagttgctgggtgcatcttttcagggtcgtcgccttcaacaaagattggttcccaaccattgccttcgaagtatttcgttaattcttcatcactcttgcgtgaaagaattgttgggttagaaatcttgaaaccgtttaagttcaagattggtaagacagcaccatcattcttaggattgatgaatgtgcttgataaccatgatgcagctaatgggccagtttcagcttccccatcacccacaacaacagcagcaatcacgtctgggttatctaaaatcgcaccaacaccgtgtgataatgaataaccaagttcgccaccttcatggattgaaccaggtgtttcaggagccgcatgagaagcaacgccgcctgggaatgagaattgtttgaataatttcttcatcccttcaacatcttgagaaatttctggatagatttctgaatagctaccatctaaatatgagtttgagaccatcacttgaccaccgtgacctgggccttcaacgtagaacatgtttaagttatatttattaattgcgcggtttaaatgagcatataggaagttttggcctgagattgtcccccagtgaccaattggttttgccttaacatcttttgcttccaaaggacgtttcaatagtgggttatcttttaagtataattgaccaactgagatataatttgcagcccgccaaaatgcgtcaactttagcaaggtattctttgcttgaataatctgtcattttaatagcacccctttttaattttaaaaaagttcctaatagctttactttaagttccagtcgcagcttttgcaactttgttgtttctgactactctcttatcatactaaactttttaaaaaagtcaaccatttttaatattggggcgtaccaattttttaaatctaaaaatagcggccctattcgcgaccgctaaccgtaacgaatgtattatatttcatgtattggtagtgcaggcgcatcgttgaaaattcaaacggtgtcccatcgtctaagaagaaaatcccttccatgatgccaactggttccgtcggtttcaactttaagtgcgcttgatcatcatcagttgatggttccgcgaaaattgacaggaaagcgcgtgtgacttcttgatttttctcggtttccaagtagttaaagattgaactcgacacaattttttcggtcaattcgggcattaccttaatcggaatgaagcccgtttcaatcatgaatggttcatcatcaaacaaccggagacgcttgatttcgtaaacaaaatcatctggtttcaggaacaagtctcgttgcaattccgcgctcggcttgatgacttggaaatctaataatttaatccccggtgtccgattaccggctttaaaactgtcggtaacccctaggttagagccattgtaattaaaaaacgagccaccctttaaataaagtggattaataaaggttcctgaaccccgttttttgaaaatgatcccttgattagccataatgtttaacgcacgtttgaccgagctacgactcacttgatagtgttcagtcaacgtccgttcatcgggtaatttcatgctgggaaatgattctgcgttaatcgccttttttaagtccgcgataatattctgataaactaagtcggccatgctaaactcctttataaatcattttatctcaagcttattatacatgattcctaaaagtcgtctacaaacagactcgataaatgttcaattattaatgcaggccaataaaaaaagaggtgctgagacaatgtttattgcctcagcacctcgcgcgctccagatcagactatcttgcaaaaaatgcctcacagcgcctactttttatttaatgtgcttgaaattgggtatagtattctgctagtaattgggcaatccggttcccagtaatggcataattttcagcgggttggttagctaatgaaatccgcaagtagccatcatcagtccccattcctgccccatccatcacaacaacgccgtatttagctgcaagtttatcttcgaaatcaagatagctcacgtgcttttcgaaatagtcgtggaattcatgcccatactttctttcagcaaaatcatagatgttaaataccgcataatattcagcgttttctttagagtgatcacattccatgcccatcgattcccaaaaagcgttgtatcgcgcatcaaccattttcttggaagcttcgatgtatggatccttttcaccttcgtgaattaagctggtcaaactaaatagtgccatcaaaatttgttgtggtgttgataatcccgcggtgtggtacaacgcgatttcacgactgtcagccactgttcgatcaatgaatttcatcgcaagcggattaggcgccacaactgagtaccgtttttcaaaagctgccttaattgctggttcttcagccgttcgcttagcaataatttcatcaaaaacattatcttggtgcactgctagtaagcctaaacgatgcccagttgccccataaagttttgaatacgaataaactaacatcgtatttcggggggcaattgagtaaattgtttggaaatcattcacaaaagtcccataaacatcatccgtaatgatgataatttctgggtttgcttcaacgacctctttaatcttagctaacgcgtgtttgctgaaagcccgcgaagtggggttcgttggattaaccacaaaaaaggctttgattgtcgggtccttcaattcttcaaacttggcgtccatcatttgccagttgtcatcttcaacggaactcacatcgaattgctttaatttatattcacttaattctgggatttgcaaataaggggtaaagattggggtattgatggcaatcgtgtcgccaggccgtaagatatggctgatcttcaattccttgaacaaataaaccattgcggctgttccgccctctgttgggaagacatccgtttgattagctaatttttcaccattatatagtgacacttcaaggtatttatttaggattttttccacattgattaaacttctcgaaggtactggatagtgattgccaatcgcaccgtcgacaaattcgtgaaccaaatcatcctgattgaggcccatgtgcttttcggtataatctaaaaaggctaatataaatcgatctgttttatgactggcatcaaggtaggcatgcagccgttgtgcaatccctgctttatcaacgtagcccgccatatctccatcagcctcgttaattttcttagcagattcttcgacgccaaattcgacaagcttattaaaagctaatcgcgcccgcgtattaatccagttagggtccccacgaccaacattaattggcgcattatgcattgtatttttttctgaattttctaagaacaaagcggcaacttcaaagtttgacatctcttttaatcgctcaatatctaatgagtgcatcgtttttccacctttttcaattacttgctacattcataatcgcatctaaaagcactttaacgctaattgacagtcaaaataacggctagcattgtaaatttattgtttgatttattatatcgtttttgtctcaaaaataaagcactcattcaaaaatcaaaccataaatgccacagcgattctccaacttcatattgcatcatttaccacaaacctgcaaccctgcggcgggattttttctaatgctgctaaaaaagcacatcatcgttcaacgatgatgtgctttttaaagttttaagcgacgttattccttattttctttgaagaacttcgcgaaatttttgcggtaattgtgcaacatccatttaatcaatagccagcgtttgagattcatatctttgctatattcaaaagtggtgccgtaacgtttttgtttgatgagtgccaatgccttgtctttttcggcattattgcgggcatatttcttaaagacatccactgaaacgcccaaccaaagtgcgggactgtcttcatctttattcgcccaaacaacaggttcatcttgcaagtcgtttgtcacgtaatcgcgcaccacccactgggctaagttatagccgttcaaggtaacaaagaaactactgcggcccatccgtaaattgatgtcgaataacttgtaggtgttatcgcgttcatcatatttcatatcgaggttggcataacccgtaaactcgatatcttcaaggaatttttggacttgttgataaatttgtgcgttgtattccggcaaaatcgccacgtaattcccaatagctgcgggtgctggatcttccaataatggatggcccagacacatcatcttcacgtgatgttgttggtcaacatagatgttcatcacgtgcatccgactgtcatccccaggaatgaagtcttgtaaaatcatgtctgattggtagccattttcatatacttttcgcatgatgtcttggaattcagcttcacttttaatcgtgaaagcttttttgcgcccttcaaaatgcacatcaagccattccacagaatccgccggttttaacgccactggatattggaaaggttgttccacctgattatcttcaaccatttgcttggtaatgatgtgcgtcttgggataaggtaagtcatatttgtcacagatttcatagaaggtttccttataagtcaacttttctagtaaatcgtgatcaatatatggacaaacaaagacatcttccaattccgctttatgttgtgaaattaagctcgcatagccatcaccacagccaatcaaaatgactgggccatcgctatcgcgatagatttcctttaattttagcatttcagtaatgaatccaggatcttcactgaagcctggaatcaattctaaatcgacgatttttgtaaaccgagttggtgctaattcctgacttgcgtaggccttaacaggttcatgatacatctcataaaacgaacgggccatcccgtaaacgttaaaatcgctccccaataaaatgggggtgaagtttttaccgtttgcttgcatgctgtcaccttctatatcaatatttatcgtagtataccagactgccgttcaatatacgtcagctcaggatgctctttgttaaaacttaattagtaattgctacttgttgtatagcccgtcgacaatattttggccgaccactgtcatcggatcaatcactttgtcgggatacaatggaaattccgactgtgcaacactcaattcggtacagcccaaaataaccgcgtcacaatcatagtcatttaacattgtatcgacaattttttgatacttgtcatggctgaatgtcccagtcgccttaatgtcatcataaatcaaactcatcgtggcatcttgcaatgtttggtcgggaacaacactttcaagaccaaaagcagcaattgctttttgataaataccggcttgtcgggttccggttgtgctgagaacaccgattttcttcaagccgggaattgtttgttgcatgtgtttgaccgtttcccgtggcatgtggataatgtcgaaatctgcggcagcttgtaattcgtcgtagaagtaatgggctgtgttacaggtcattaccatgaacttcggcgctaacaaattcatttggcgaatatcttttaacatcacgggcaacggattttcttggctgttgtcgaggatgtaggctgtgcgatctggaatttcagcgtggttgaacacgacgtaattcagataatcttgatccttcttagccggtgttaattcatcgattagatgtacgaaagtttcggttgccgccgtccccatgccgcctaaaatcgtaaacatttcttccatggcaattctcctttacttaattgacttcatttgatgctggttagtccttcttttgaggactcacttcgatacctaattcttctaattgttccggtgtcacttcactaggcgcattggtcattggttctgtggcccgggaatttttagggaaggcaatcacgtcacgaatattgtcgcgactagcgagcaacattgcgaaacgatccaaaccaatcgctaagccgcctgatggtgggaaaccgaatttcatggcatttaataagtggccgaaacgttcttgagccacttcaggggcaacccctaaaacagataacattttttcttggacttctggatcaaaaatacggagtgaaccgccacctaattcataaccattcaagatgatatcgtatgaaattgcatgtgccttatgtggatcagtatccaacaatggaatatcttcatcacgtggacgcgtgaatggatggtgggctgcaatccatttgccaaagccttcatcatattcaaataatggccaatcaacaacccatgtaaatgcaaattggctcttatcaatcatatccatttctttagcgaagtgtgttcgtaagtaacctaagctatcacaaaccacttggaagttaccggcaacgattaaaattaaatcatcatccattaagttcaaacgttcaacaagcgcttcttggtaaggtaataagcctttagcagaagcccctgataatttatcaccagcgtatttcgcccacaacaatgacttagcgccgtaacgttcaatgtattgttgttgttcgtctaacgctttccgtgaatatttaggggcggcattattaacgacgattgcgcgcacatattggcctgcttcaacagcttcagagaatggcttgaagtcagaatcttgcacgatttctgtaatatcttgaatttgcatatcaaaacgaacatccggtttatctgaaccatacttgtccattgcatcttgccatttcaaacgtgggaatggtgtttgcacatcgatgcccttgacgtctttcataacttttttcaataaaccttctgtttcggtttgaatttcaacgtctgataagaacgttgtttcaacatcgatttgtgtaaattctggttggcgatccccacgtaaatcttcgtctctaaaacaacgggcaatttgatagtacttatcaaagccggctgacatcaataattgtttgaagagttgtggtgattgcggtaatgcgtagaaactacctggataaacccgtgaaggcaccaaataatcgcgtgcgccttcaggtgttgaactcgtcaagttcggtgtttcgatatttaaataaccattgttatcataatagctgtgaactgcacgagtaatcgcagcccgtgttttaatggcattttgcatttctggtcttctaagatccaaataacgatacttcaatttcaaatcttcagaagccgtattgttatctgaaatttcaaatgggagggtttcagctttgttcaagaccactaagtctttaacaatcacttcgattttccccgtcttcatgtctggattaatggccgcttcatcacgcgccatcactgttccttggacttcaacgacatattcactctttaatttacttgctacttggaaaatatctgcatctgtgtcttgattaaacaccaattgaacgatgccttcgcgatctcttaaatcaacgaaaattaagttcccaaaattccgttggctttgaacccaaccatgtaatacgacttcttggttgagaaattcttccccaactaatccacaatatgttgttcttgttctcatatttgccaatcctctctgaatctacattttataaaaaataaaaaaagcaccctcgtctttcgacaagggtgctttgcgcacggtaccacctttaatttcagctgttgataacgctatctgctagcgggatattcatccaagcctcaaaagctgtcaactggaatcaataagtaactttcaacggggttactctctctgtgattgatcgctaaaaccaagtactttatcgatggctacattttattataatgtccaaaatatatcacaaagccctttaaccgtcaagttttgcagttggattgagctagctggattcgaaccagcgcatgacaggatcaaaacctgttgccttaccccttggccatagcccaataatgcggcaccaagattaagttggcgccgtaaattgattgaattgaaacgtgctttcattaactgctttctgcgttttgctacgtattgcaaacaatcagctgtgctgattattcacaacactaggcaagtgttcaaaagcaacccgttaatgacacactctaaacgtgcttttgatgacaacaatttccgcttaatctaaaattcccaataatcctaaaaacccggattattgggaattttgtattaatgctcagttgttaaccgtcatcaaacgcactctaaacgtgctttggcagccatcttcttccggttagctacatcagtcaaatcaccgactttgtcggtaatccgcctgattaggctaatcctcagaagataaccgactgcctgcgcactctttaaattaccatacaaatagtccgactgttgctgctgaaagaagtgatactaagattcctgatagcaacatgtagccgacgtttttggcaatcatgtcgttcttttcacggtccacaaggcctttgaaggcgccgatgatcatgccgactgttgagaagttggcaaatgatgtcacgaagaccgttaagacagcttggtaatgtggtgcgaagctcccgattgaatgttggactttacccatgacaacgaattcgttggtcaccaacttcgtccccatgaattgtgcaaattcaaaagcgtggtgcacatcaagtcccattaaccatgcgaatgggaacatcacgattccaagtaaatgttcaagggtaatccaagggttcactaattgaagcaccttgtcgatcaaggcagccaacgcaacaaaggcgatgacgtttgccgtgataattaaaactaatttaccagcatttaagattgaatcacctaagaatgagaagaatggttcacgttccactttgccttcaaccatttcggttgcttcaacagctgcggaaccactcccacccattttagcaatcgtatcttcttcgggtgtgactttcactgggtttaaaatattggtgacaataatagcgttaataatgttgaccggaatcgccgttaaaataaattggcccggcatcatttgtgtatatgcgccgatgatggaagctgtcacacagctcattgacatcatcgcaagtgttaatgttcgttctgctttcatttgtttcaattgtaagcttgaaacagctaatgcttcggtattgcctaaaaacatcatttcaactgcaaagaatgattcaaactttggttgtcccgtaatcttagctaacccacggcctaaccatttaatcacccaaggcaagaccccgatatacgttaagatatcgaataatgggataatcatcaagattggtaataacacgctagcaacgaaatccatttgtttcacattgacccaacttggtagtgcaaaagcaatcccagtataggcaacttgcactaaccagttaaagccgtttgctgcacctaaaacaatatcccgcccgattgaaaaactcgttaaaaaccaagcaagcactaagttaatcactaacatgattaagacggagcgccaatcgatttctttctttttctttgagaacagaaagccgactccaataaaaatcagtaatccaacaacatttacaagcaaatacacgacacgccacatccttcatttgtctttttcgtaccgctttaaataataccgttcccccttgtaaatgtaaactattgttcaccccctaattgcataaataatcacttgttaaacgcaactaaattagtccacaaaaaaagcggtccccttttgcaaaggaccgcttttccattcatttttaatagcccgcattccactgatttgtagactgttgcgtttgccaagtattggtcgtgttactgtaatcgttgttaccactataagttgcactgttcgagtagccatagttactttgcgtcgtcgttgcagcactcttttcaccattcatgacactttcagaataaaccgtaaactcttgatgattttcttcacctgtaaagttggtattcaaatcgttttgtttggtttctgcgttgttaatcgttgttttctctaatcccagtgacgttctcaagacatctgaaacgcgttggatttcttcattggttggaatctgatacgaactaccatcaatatcagcattacgtccaattaaaacatcagactcaattgatttagctgcctttcgataatttgcttgaatcgctaccatgtcatcaaaactgaggttagtggcaacactatctgacaaggagtctaagatagattcaaagttggtcaaagatttaagcgagactgcagaattaatcatagacgtgataacttgtttttgccgtttttgacggccataatcgccttctggatcatcgtaacgcattcgtgagtagtctaaagcggcttttcctttcagatgcatcttgcccttagtaaactcgctcccgttccattcgaacgtaaagggtacgtcaacatcaacgccaccgacagcgtcaacaatcttcgataagccccccatgttaaccgtgacatagtaatcaattgggacatcgaacatcttttcaaccgtcgacatcgccatatcagaaccaccaacattataggcagcattaatcttctgcatgttaaattcatctgcgccttgtaactgcactagcgtatcccgaggaatgctgaccaacttgacctgctctttatctgggttgaccgtcgccacaatcattgtatcggaattccctttatcaacccggccctcagcaccagtatccactccgagtaataaaatagagaatggttttttatgtttaatcgttttagcggcttttttagtcgtatttggtttataaattttattcgttgcagacttcacttgattactgatgcgtaatgcatacgcgccgccaccgaagaggactagcgttagaatgagtatcaaaactttcatcgtgcgatgctttttaacttttttgtagtttgcttctcgagatccgaaaaatttagaattctgcataggtgtttcccttctatcatgtatcataccggcattaataatgttatgttgctattatagcggaattatcatttcaaacaacgccttttaagaaaagttacacaattttaataattccttcaattgttgaacaacactttcctaagcgcttttatgctaaaatataaacaattagtcttaattatggaggtttcatatgtcaactcaacaactccccacccgcaatgctgttccagaaaagctcacatgggacttaaccacgattttcaaaaatgatgcagcttttgaagtagcctttaagaaagttaaaacgcaattacccacactcaaaacacttgatcgtccgtttgaatcggctgatcaattagtcgctacaatcaaacaaatcttagccactttccgccaactcgaaacaatttacgtttatgctagcatgaaaaatgatcaggatactgctaacgcaacttatcaaggctatcaagcccaagtggacagcttagcggccgaagtttcagccgccgctgctttcttagaccctgcgattctcgcaattcctattgttcaattgaccacttggttgtcagaatcccctgctttagccaaatacagccatttcattcaaaccattaccgatagtcgagaccatgtcttatctgggcaagaagaagccttgttagctgctgccggtgatatcttcagtgctgctagtcaaaccttcagcgtcttagacaactcggatttacaattcccagaagtgactgacgaaaacggacaaacgtttcagctttcagacggggtctacagccaacttttgcaatcagccaaccgatcagtccgccaagcagccttcgaagcactttacaaaacttatggtcaattcaaaaatacatttgcgacgacgcttgccactgaaatcaaaggtcataattacttagctcaagtccatcactacgatagtgcacgccaagcagcgctagcacccaaagcaattccagaagccgtctatacaaccttggttgatcaagtgaaccaacacttaccacttttacatcgctatactgaattacgcaaaaagcaacttaatttatctgaattacacatgtttgatctctacacaccacttttaggaaaacccgcattaacctacacttatgagcaggcgcaagcaactgccaaagaagcattgtcgatcctaggacccgattacgccaaacaagttgcccatatttttgatgaccgcttaatcgatgtttgtgaaaaccaagggaaacggagtggcgcctattctggcggcgcttatgacaccaaccccttcattttattaaactggcaagatgatttaaacaacttatacacattggtccatgaaacggggcatagtgtccacagcgccttcacccgtcagacccaagattatgtttatggcgactatccaattttcgtggccgaaattgcgtcaacaaccaatgaaaatctcttaacggaatatttattgcaaacacagtctgatcctaagatccaggcctatctactaaactactatttggatggttttaaaggcactgttttccgtcaaacgcaattcgctgagttcgaacatgcgatgcatgctgccgctgccaatggtcagccactaactgccgagttcatgtcacaacaatatgcggacattaatagccgctactacggacctgacgtcgttaacgatccacagattgcccttgaatggactcggattccacatttctacatgaactattatgtttaccaatacgcaaccggctttgctgctgcaacgactctcgctaacggtattagcaccaaacagcccggtgctctcgatcactatttagactacctaaaagctgggagctccgcctacccaattgaaattatgcaacaagccggcgtcgatatgacgagtgccgactatctcgaacgcgcttttgcagttttcgaagaacgtctggatcaactcgaagccctacttgctaacctaaattaagcctcatgaaaaaacgtcctcaatgattgaggacgtttttttaacggctaattcgtcgatgatataacaatgcaataaagtaaaagccaaactcaatcgtggcgatgaagaaggtcactggccagttcgttagataaccaagccataaaccgagccaaacccctaataacgctgcggcaaccgagattgccaacatcccgggtacgctcttcgctaaatatttagcaatgaacgccggaatcgtaactaagatgaatactagtaatgaccccacaatctgagcagcaatgctgacactgacggctaataaaattaagaaataaatcgatagtaagttggtctttaaaccttgtgcttgagcgccaatcggatcatatgaatcaaataccaagtaccggtaaaagatcaacagcccaatcataattgccccagataagatgattaattgataaacatctgctaagctaatgccaataatcgaaccaaataaaatattggtagcataactagcatttcggtttgaaagggataaaaagagaatcccaaaaccgacaaacagacttgaaatcgcactaatcgacgcttctcgccgtgattctttggcactcatctgaccaatcgtgattgaactgagtaacgtgaacaataacatcccattcaatggtgcaattcccatgaaaaccccaaatgaggctccggcaaatccaatttcagatagggtatgcgctagaaatgacatgttccgcgcaacaacaaataccccgattaaaccgcaggtaattgcgataaaagtactggcgacaaaggcatgccgcataaaatcaaaagttaacactcgcttatcctccgctttaatctaattccaaattgggatccaactgactcattggtccggcttcatattgacctcgttttaaaaataggtattgatccgtgtatttccgggctaattctaaatcgtgggtcacaaaaataaccgtcaaaccatgttcccggttcaactctgcaaccaaggccatcacttcttctttagtttcaatatccaaactcgctgtcgattcgtctaaaatcaataagtctggtttactgattaatgcttgggccaaatacgccttttgcttttcaccaccagaagcattccccacggtcgtcttttgcaacgcggttagatgggtctgttctaaaatttgatcaagcgcttggcgttctttgcgcgatttccacggtaagtggctatcaagttgattcaaactcacaaaactacgaatggacaacggatattcagcttctaaatttctaaactgtggcacataaccgatgtttagcttttgcttatccgggttaaaaacgagttgtccttctgtcggttgtaaattaccgattaataggcgcaccaaagttgttttaccaaccccgtttggaccgattaaactcgtcatgctaccacgttcgatcgtaaaactgagatcttttagtacttgtcgattactaaaggcaagccctaaatgttgtgcattcactaattctgtcattttgaatcctgagcctttctaactgcatcaaattgctgttgcatccatgttaaatatgtttttttagcgggtagtgtttcagttacttgtacaactggcaccccttctttatccgctagttcgtgcatttgtttaataatgggactttcttcttgcttattaatcactaaaaaggcaatctgatgggttttaattaaatcccgcatcgttgtaatatcttttggtgatggatcggtcccatcttcaattgctttggcaaagtgttggttagcgactttgtaacccatttcagccaatgcatagtcaaaaacgggttcactaacagccacttgttttcctttggcctgcgcctttagttgttggagttgtgcgtctaacgaagctaactttttaagatacaccgcaccattttgctgatacgttgccttatgtttcggatcgcgcttgctaaattcagtcactaatcgcttggtcaatgttggcatcgtctttaaatcataccataaatgttcgttagcgccattagattgtttcattaattgactgactgtcaacacagtttggtcatctggttgggcactcttaacgactttgtttaaccagctgtcgtaaccaagcccattttgaatcacaatatccgctttagccacgagtttagcatcattggttgttgcttcgtatgaatgtggatctaaactgggactattgataatcgacgtcacgtgaccttgattacctaaaaccgcttgtgcggcctcaccataaaaatcgagtgacgatacaacttgaatcccactcgcctttttcgtactctgaccacaaccagccactaatagcattagcagtaagattcccgccatgatttccaaaccttttttacgcatctttttctcctcttttctaaatcgtaattattacgttttactaaaaatattttacacgagtctcactaattgtcaatcatttttctgaaaacacttaaaaagggattgggacaaagattgcttttgccctaaccccttttttgaattgttgaactttaaacgtgttctgtaagtcattctcctccggttaaccctgagtcgcaaacaattactacaattattcacgctctgtgttaatcctcggagtatcccgacttacgccacactctttaattaccagatttgttccactgcacctgttgcttggacaacaaaataacctgcccgtggttgatcttcgtttggtacgtaaatattaatgagatagccttgttgtccaccgcgtgtgattaaaccattattcaaatacgatgcggtttgaccaaattgtgagccaacttgttgaaccaccaacttaatcgcttggttgccatctacggcagttgtttgttgtggtgtcgtggtagtcgttgttgttgcactgctgctagattggctcgcagattgactactgctacttgccgttgtagcagtggatgatgattcagcaacacttgcagttgatgaacttgcttgtggggactctacttcagttgaagatgccatcgccgctttggagctcgcttttaattggcttgcactacttgaaagttcactttcgcgttttgcaacgctactttcacgtgctttgagactagccgtggttgaactttgcttggcatcagcatcttgatttgccgtactactttgaccacaggcccctaataatagtagtcctgataccaaaactgtactaactgtaaccatctttttcataataacccctccaactcctattgattcatctttattctatgagacacacctcagaatagcaattaaatccacatctgatttaaaaatctttaagaaacacgctgattagcttaacttagcagccacttgcttggcaatcaccatatcagttggatatggtgtatcgaccccgcgtactttctgataagcatcggcccctttagccgctaagacaacaatttcgcccggtttactttccgtaatcgcctgttcaatcgctgttggacgatcaatttcgatggtggttgtcaccttatcctggtcaatcccggccaaaatttcagcggcaatggctgctggatcttcaaatcctggatcatcagtcgtcaaaatggcccgatctgcatattcattaaggacttgcgcaaacccagcacgtctagaaacacctttatcgccaggactaccgacaacaactagtaggcgtggttgattgtattccttttgcaagaaactcaagagcgccttcatgctggcataattatgcgcgtaatcaacatatacttgaccatgtcctggaacggctaaggtttccatccgtcctggaatctgcaagtcgcgaatcccttgttgagctgcgattaaatccgcccctgccaaaccggcaccaatcactgcagctgtcgcgttactttcattgaaatccccaattaaacgcaattggtaatcaccagaaacaccaagctgaatggctcgttcagaagccgcggtaactttaaaccgactttctgctaagcccgtttctagattttcaaagcggaaatcaactgccaccggaattgtaggttgataatccgtttcggcaaataagtaaattgattccggagcagtcgtcgtagttgctgcagcatacacatccgcaaaatattgcgtttgcgcgttaatcacacagtatcgtgagttgaccaataattgtaatttgcagtgtaaataatcttcaaaattaggatgttcatttggtccgacgtgatcaggcgaaatgtttaggaagaagccaacatcgaacgttaagccgtacactcggtttttcttatacgcctgtgacgaaacttccatcactaagtgcgtcatcccgttttcaactgctttgcgcatgtcgcggaataaatccaaactttctggtgtcgttaaattcgatttgaagcgatcctctggtttaggccctaagacacgatcaattgttgaaaataatgctgttttttgacgggtcgtcgcttgtaaaatcgattgagtaaagtaggccgcagttgtcttgcctttggtcccagtgtaagccacgataaataaatcatcttgtgggtaatcataaaaagccgctgataaaaccgccatcgctttttggacgttcgtgacgattaaggcgttcatcccgttgccttcaacaatcgcttgttcggcaacatatgttacggcccctaattcttttgcatttgttaaatagacgggacgaaaattccctttacagaaaaagagcgtgtcctcagttacctgccgtgaatcatacgcgattccggtcatatttaaagtcgggtcaccattaagcgccacacttttcaataaatgatgctcttttagaattaacgtacatgcatctaatgttaaagccattttcgtcctcctcaaaatccttgtgaatggttttaattatagcacgatttaatcatgctgcgcttgaaacggcttataatcgtagccataaaaaaacgcgccaccgttaagtgtcgcgtttcaattccaactaaaataggttcgtgaaaaattctttgatcccttcaccgattaaaacaaataaattggctttggggtccgctgttttagtgcgtaattgtgattgtggcgcttgtccgatataccgcgtagtgacaccgttcaattgtggtgtcacttgaccaatttgcacattctttttaataggtgcttccaattggcgttttgcaccacctttgactgcttggtaatgccagtcaatgttggctgctgtggttccttttggcacccacattgaaatagctttgttcgtaatcaattgcactgtcttttggcgaccatatttaaccgtcgctgtcttataaggtgcgagactctgattggcttgtgccaattgtttttgttcccaaccatcgaagacatattgcattaacttgttagtttcaatgaaccgccggccagtatcttcaccattggcatgcatcaccactgttagaatccgttgcccatctttcgtcgcagttccggtaaaacaatcgcccgctttgtccgttgtcccggtttttaaaccatcgaccacgtagtcttgcggtgcattattttcgccaggtaacattaagttccacgttgacatggccgtttcatcacttgtttgggcgccaaatgtaaaatgcgcttgcttggttgtttcgagaatttcaggataatcagccaacaacttttgcgctacgagtgcgacatctgccgcactcatttcattttcagcatcagccggactgcctggataaacttcagcgccgaggaattcattgttcaagccggacactgaataaagttgtgcgtcttgaatgccccaatccgccactttttgccgcattaaatcgacaaaatccttttgtgaaccggccacttggttggcgagcatcatggctgcatcattcgccgaagcgaccatcatggcttggaaaagtgccttgacggtatattgtccgtccgcttgtagaggcacattcgttaaatccttattttgactcaattgataaatgaggtcatcgggcttcaccgtttgttcccacgttaacttaccttgcttaatttgcgctaacacgatgtaggctgtaatcatcttcgtcatcgaagcgattggcaacgcctgatccgcattttgttcgtataagacttgtccagttgctgggtcgagcgcaattgctgcactcgtatcgatttgaggggcggtcggcaaactcaccggcgtacttgccgctgcgactttggtagtctgggcactcaaaagaccgccaacgggtgcaattgccaataggccgaccattacatattgtactaattttttaaacacaacattactccttaactgattttgcgccagcagtttgaggatcaatccgccgacctaacttcaaaggtaagtgtatcacaaaactggttaattctggcgtcgaatcagcataaatataaccgccatgtaacgcgacaatactttgggtaattgctaacccaagtccagtgccacctgtttcttgtgaacgcgatgcttcaacgcgataaaagcggtcaaagagttggttcaatgaatcacttggaatttgttgaccatcatttgacactttaataatcgcctcttgaccgattttttcagccgccaacgtaatttgtttgccacccttgccatatttcaaagcattagcaattaaattattgaagactcgaccaagcttttcagtatcggcttccatcatcagtggtgcaggattacaagttacattaatctgcatccccttcttattcgcttctaactcaaaactggccgctaattgatctaacatctgctccatatcaaacgttgtcttggtaatgggagtcgatgtttgccgcaccttcgtgtattcaaataaatcctcgactaaaaccttcatttgttgcgccttcacgaaagcagtatgcgtatatttggttagttcttccttggtttgatactgattatcttcaattaaaccaagatatccgatgattgaagtcagcggcgtccgcaaatcatgactgacattggtaatcaattcgtccttactcttttcaatcttgcgttcttcttccattgaacgcacagtactatcaaccagcgtgttcacactatcgatcacgcgttgcaaatcacggttgacacgcaaattaatccggtggtccaaatgaccatcggcaatgtaatgcaactcaccaatcacgtgccacatctgcatttgatggtaacgccgaataagccgccaatagacgactaacacatcggcaacccccatcaagatgacaaaccaattttgccaactccaaatatgccattcattcggaccaattgtaatggcgtttttaatcatccatacgccgccgcttagttgcggattattcacaatcgcctgttgtaacagcaccatgattgataaatttaatagtaataacaaaataaccgtgatgataccctcggcaaagagttcgctcttttccttagcggttagtgccactttttgcaggttcttttctccttgatagtcagccattaaacttctaccttatacccaacaccccagacggtttcaatcactttttcaccatcggttgcttcttcaattttgtcgcgcaaatgacttacatggaccatgaccgtcttggcagagacgatactttcttgtttccagacccgttcaaaaatatcgtccgctgaaaagacccggttggggtgactggcaagtaagtataaaatcccaaattcaagtgcggtgagttggatttgcttgttattaatcgtcgtcacttcatgtgagtcgcgcttaatgataagcggaccaacttctaagacatccggcacttcgttggccacttgttgttggctccgccgtaacaatgacttcacccgcgccatcacttctaatggattgaatggttttgaaacgtagtcatctgcaccggttaggaggccttgaatcttgtccatatcagttgtcttggcagacaccacaataatgggcacttgtgaatccttacggaccgccttaatgacttcgataccactcatattcggcatcataatatccaagatcatcaaatcaatatcgggattcgtggcaattttagtcagggcttctttacccgtgaaggcttgaatgggttcgtaaccttcgtttttaacataaatacttaataattcaacaatttctttatcatcgtctacaattagaattttcataatcgttacctcgtttaatttaacatcattttgcatgattcgctttcattgtaacaaactatcttctacttagggttaaagaattctttaaatcctccccatcatttaaccacaaaaaaaggatttaagtcgtgcaaaacgctcgacttaaaccctgatagaaatgatttgaattaacgtgctgaatagttaggtgcttctttggtaatttgcacatcatgtggatgtgattctgtcaaaccagcatttgagatttggacaaattgtgcattatcttgtaggtcctgtaaattagcagcaccaacgtagcccatccctgaacgtaagccaccaagtaattggtaaattacatcgccgagtgcgcctttggcagccacacgaccttcgatgccttctgggactaacttgttggcttcattcacaccactttggaagtaacggtctgatgaaccatgcgacatagcagccaagctgcccatcccacggtatgttttgaaacgacgtccttgatagatttcaaattcgccaggtgcttcgtcagtcccagctaacatactaccaagcatcacaacgtttccaccggctgcaagagctttaacgatgtccccagaatatttaatcccaccatcagcaatgatggttttgccatattcgcgggcaacactggcagcatcgtagatggctgttaattgtggtacaccgacaccagccacaatccgagttgtacagattgaaccagggccaatccccactttaacgacatcaaccccagcatcatacaaggcttttgtgccttctgcagttgcgacattcccagcaatcaaggttgcttcagggaagcgttcgcgaatttcactaatcttacgtaacacaccagctgaatgaccatgcgcagtatcgataatgatcgcatcagcccctgctttcaataaggctgcagcccgttcaaaagtatcgcttgtgacgccaacagcggcagcaactaataagcgaccatattgatccttagccgcattcgggaattcttgcactttttcaatatccttaattgtgattaatccggctaagcgaccgtcatcaccaactaaaggtaacttttcaattctgttttgttggaggatttgttcagcttcttctaaagaagtgccgacaggtgcggttacaagtgcttcgtgcgtcatcacggttccgatttcagcagagaaatcagagataaaacgtaaatcacggttcgtaataatgccgactaattttagatcatcgagatttgaaacgattgggacaccactaatacgatatttacgcatcaaatcttcagcagcactaacgggtttatccgctgttaaataaaatggatcaataataacgccattttctgaacgtttaaccttcaagacttcatctgcttgacgttcaatactcatattcttatgaatcacgcctaaaccaccttgacgcgccatagcgattgccatgggtgcttccgtaacggtatccatgctagcactcataattggtgtgtttaacttgatattctttgcaagttgcacccctaaatcgacttcgttggggagtacatgactctccgcaggtattaataaaacatcatcgaacgtaaaccctttttttgtaaactttgattcccatgcagacataatcttcctccaatttgtgaactaaattaaccgccgacccatcgattgttcgtattatctttaatcgataaccagtttaaaatttgataaaatattagcagatttttctgcaaacgtcaataaactcttattgaaaattcattttcatcaatatcgtgtacgaatgaatcacgaacatttaaaataagggtgcacaccacccagcttcgttatacaatagaaataactgattataaaggatggattggcatgcaagaacaacaacgggttctagatttaacacgaagttataacctacgcgaattaggcggttaccaaacggttgatggcaagtccgttaaatggcacaaattattacgttcaggtagtttgaacgcgctaaccgcaactgatattgaggatctcttaaattacggtgttgcttacgatgtcgatttccgttcacgtcatgaaatcaaggtcgcccccgacccatttgatgacaaccaactaacctaccatcgtctttcggtatttccattcactgaccaagccgatacccctaaaaagccagccaaaaaaggcctaatgcggctttttggtaaaaaagaagctgctactcccgaacgatcaagtatggaccggatgtaccaacaattggtcaccgactcccatgctcaagcaacttatcgtgatttatttaccgtactattaaataatcacgatacaaacggtgcagtcctttaccattgctcagccggtaaagatcgcactggtgtcgcaacttttttaattctaagtgctctcggcgtcgactggaaaacaatcgttgccgactatgtcctctcaaatgaggtcctaggactcagctcagcaaccccaacccgaatttcaagtaacgatagccaggtcgcttcaatgaacgctaagagcattacacaggctaatctagaacttgtccgcgacacgattaatcaagaatacggcaacatcgaaaactacctatcaaaggcaatggccctcaaaccagaagaaatcaaacaattaaaagaggactacttagaatagcgtgcgactgcaaatggttatccgctgaggattagcctaaaaaggcgaacacaagcaattgtgttcgcctttttgaatgatcttttaatgactcttaatataattttcgccatccgctgctggtgcgacggccttgcccaagaaaatcaccagaataataatcgtaatcgcgtatggtgcaatctggaaccagacactattcacaccggccagtattgggatgtagccgccgataatcggcaaactttgtgcgagtccgaagaaaatcgatgcacctgtcgcgccaattggatgccacttaccaaaaatcatcgccgccaatgccatgaagccctgacctgaaatcgtcgctgcgctgaagtttaacgtaatcgactgcgccatcaccgcgccaccaatgccgcctaacaaaccagacaacatgaccccgatataccggtaacgactcacattgatgcccagtgtatcggctgccgctggattttcaccgactgaccgcaagcgcagcccaaaccgcgttttatacagcacataccaactgataatgccgaccaaaaccgcagcgtaagccactaacgacgtcttcgtaaataaaatggggccaatcactggaatttgggccaagccggggaatgtgaagttaccgatgctttgattaatcaccggcgtttgccccttaccgctatacagcacacgggttaagaagacacacaatgcaggcgccaataggtttaacaccgtcccactaataatgtgattagcgcgcaatgttacggtcgctaaagcatgtaataaggagaacagtgcaccaaacagtccaccaaccaataaggcaatccacggcgtcaatccgccaaaaaccgtactaaattgaagggtaaagacggcactgctgaaagccccaacaatcataatcccttctaaaccaacattaatcacaccgctatgctctgaaaaagcaccacccaaggctgtaaaaatcaatggcgccgcgtaaactaacgtggtcgcacaaatcgtcattaaaatcattgtgattgtcattatttttcaagcctctctttcatcaacgcgtgttttttcagtaagcggtgattgagtaattgttcaaataagaagcgcacacccacgaagaagataatcgatgcaatcacgatattgacgatttctgtcggagttgttgagtagacggaaatgcttaagccaccaatctgtaaagcagagaataaaatcgccgcaaagataatcccgattggatgcccattcgctaataacgcgaccgccattccattaaagccgatatctggtaaggcatttgaaacggaaatattttgataattccctagaccatcgacagcccccgctaacccagctagtagtccagataatagcattgcccacataatcgtttgtttcgtattcatccccgcgtaacgtgcagcttgttcgttcaatccaactgccttaatttcaaatccagtcttcgaccgtttcaaataccaccacatcacaatcaccaagactaacgcgatgaaaaagccccagtgaaacgttgagtgattggtaatctgttccaaaaaaggggtccgcaagcttgctttagggacaatgttggccgatgagtcgctgccttttggcgccaaccaacgtttaatcgcaaaattgacgaaatacaatgcgatgtagttcaacatgatggttgtgatcacttcactggtcccaaagtatgcccgtaaaaaaccggccaaccaagaccaaaagccaccgagcagcatccccgctaaaatcgcgccaagaatcaagagaatccccggtaaatttttaaagtggagtgcaaagacaatcgcgccaaaccagcccactaatagctgacccgacccaccaatattgaaaaagccggctttgctcgcaattgaaaagccaagggctgtcaaaattaacggagtcgcattgcgtaatgtctcgccaatcgaatagatatctccgaatgcgccattaaagaggttactgtaattttgaataggcgaatatccaaaaaccaacatcacaactccgcccactaacagtcccgccacaacggataggattgcaatgattaatcctgaagattgttgtttattcattcgtctcgccctcccactggttgttgcccggccattaataatccgagcgtctgactcgttgtggtttgtggatcaacttcaccaacaatttgaccggcgtgcattacaagtactcggtcagctaactttaaaatttcatctaattcaaaactaacaagtaaaatcccacagccttggttccgttgttcaatcaagctctgatgaatgtattcaatcgcacctacatcaacaccgcgggtcggattggcagcaatcaagacttttggttgtttggcgatttcgcgcgcaaccaccactttttgctgattaccacctgaaagttctccggcaagcgtttgttcagattgcgtccgaatgtcgaatcgtttaatcagtttctgcgccgtttgattgatcacccgataattaagccagcctagatgactatacggttgatggtaataatccttcagcgctaaattttcagcaatcgacagtggcaaaatcaaaccgatattctggcgatcttctggaatgcaccctaagccttgttcactaatttggcgtggtgtccgtttcaataatgactgacctcctaattcaatttttccagactgcggttttaattgtccggttaaaacctgaattaactcactctgcccgttgccatcaatcccagcaattccaacaatttctcccgcatgcacggtcaatcccagatcatctagaacagtgcgtttagcaacacgagcagcgacatgttccaccgatagcatcacagcgccttgattagccattttcggtgtgggggcttgttgcggacggccaaccatcatttccgctaattttgtcggatccgtttgtgcgactagtaccgtatcaatcacacgtccggcacgaatcacgacgcaccgatcagcaacttgtttaatttcctttagtttatgcgtgataaaaatcaacgacttcccttccgcctttaacttctcaaaaatggcaagcaaggcttgaatttcattcggtgtcaaagctgcagtcggttcatcaaaaatcaatgtcgttgcttctcggtaaagcgccttgataatctcaacccgctgttgcatcccgaccgaaatatcagcgatttttcgatcaaggtcgagcgccagttggtatttatcgactaaagccgtgaccttttgccgcgccgttgcatagtcaatccggccctgtttagttggttcgtcacccaggataatgttttctaagaccgtaaaagccggaattaacatgaaatgttggtgtaccatcccaatcccgagggcttttgcatgtcgagggccatttaaggtcactgcttgtccgttcaccagtaattgccccgcagtcggctttaattgtccggtcaaaacacccatcaaggttgatttccccgcaccattttcaccaagcaaggcaaggatttcaccctgttgcaaggttaatgaaatatcatcattggcggtaaaggcgccgaaccgttttgtaatgtgctgcatttctatcacagtttttgccatttttacgctccattcattaagcatacaaaaaggatggctgataactgctgccatcctttagcattcaatagtcgttattctgcagcaactttaatggtgcctgattcaattttttgttgatattctttgactgcttgccatgtttcaggggaagcattgtcgttcactaaggcaacgcctttgtctttcaaatcatatgtgacggttttgccaccagggaatttatcattcttagcttggttagcaagatcttccactgctgtgccaacttgtttaacggcagatgctaatgtgacgttgccaccatcatatttcccatcggctttttgatcttgatcaacaccaatcacccagactttttgaccacccttagaaatgttcttagcagcggtaaagacgccagcgccagtgccaccagcagcgtgataaataacatccgcgccgttgttgtacatcgcggttgccaatgattggccgacatcggctttcgtaaatgaaccagcatatttcacatcaacggtgattgctgggttaacggctttcaccccttgtttaaaaccagcttcgaatgttttcacgacggcactatcaattccaccgacaaagccgactttattcgtcttagtggttttcgcagcggcaaccccggctaggaatgatgattgttctgttttaaaattgacggacgcgacgtttttccgattcttaacgtttgaatcgatgattgcaaagttaacatttggattattctttgcagattggctgaccgcgttatctaacttatagccaatcgcaaaaatcgtttggtattttgccttgattaacttattaatgttcgggaaaaagtccgcatcagaactcgattgtgcgtaattgtaaccattgaccccttttttaagatcatgactagcaccccatttttccaaaccttcccaggcagattggttaaaagatttatcatcaatcccaccaccatcagtgactaaagcggctgtgtgcgttgctttctttgatgctgtcttttgactcccgcacccggctaacacgccacctaatacaaggactgtcgagaaaagtacgaccaaactttttttcatgaaataagcctccgtcaataaatttgataatttattataaacacgttatcgacataaaatcaatacattgatttcattttataaaatattgttcgtttatattgtatttgttgctaagaaatatagataatgctaatattaattgataactaacgaacaatcaggaggcgaaccatgcaaacacaagtctattttaatcacgatggcggtgttgatgatttgatttcattaactctgctcctacaaatgccgacaatcaaactacttggcgtcggcgtaattggcgctgattcatatgtcgaaccagccgttagcgcgagtcgtaaaatcattgatacgttttcagatcaatcagcgcggttagctgtggccgcttctgactcacgcgcagtccatccttttccaaaagaatggcgaactgacgcttactcagtcgatgcacttcccgtgctcaatgaacgtggcaccgttcaaacgcctctgagtcctgaagccgcacatctcgatctaatcactaaactcaatcaagcaaccgaacccgtcacattgctctttaccggcccattaactgacttggcacgcgcactcgccatcaatccaagcatcgaatataaaatcgctaaacttctttggatgggcggttcttttcttgaacaaggcaacgttgctgaacccgattctgatggtactgctgaatggaatgccttctgggatcccgaagcagtgaaaactgtcttcgatacacaaatccctattgaattagtcgggctcgaaagtacgaataatgttcccttaacgccggcgattcgccaacgttgggctagtaaacgtgccaatgccatgatggactttatcggcacctgttacgcctttgttcctcaactggtccatttcaaaactaattcaacttattatttatgggacgttttaacaacttgttaccttcttgatccaacaatcgttaaaacaaaagccattgtatgtgatgtcattccaaacggaattgccggcgggcgcacgttcttaactaaaaacggacgtccggctaaactcgtctacgacgttgatgcagctggattttttgatctaattgaaaccatcataaaagcagactaacgcaaaaaggagcaccgacttatcagtcagtgctccttttttgaacgtgctttcatcaacagcttcctgtgctttgctacacttagcaaagcggtgcttgcagcgccaattcgctaagttaggcaaatgctcagaagctacccgttgatgacgcactccttttttgaacgtgcttgctaaactaggggaacaactttgtaaaggggctgtttgaatgacgactgatttcaatcaagaacaagcgcatctatccactgtttatcaacaattaaccaccactttgacggccatcaatgatgcccaatcgcaaaaccagaaaaacggcaacaccatcaaagcgcagatcaccggtgaagccaaactcaatttcgattcatacgctgataatcttgatacattcgctgctttagaaagtatcaacaaggaaatcgatatgctcaacctgaaaaccgattcgctcgttgcacgtcatgatgagaccttacggctgttagagcaaccctactttgcaaaaatcacgctgacttttcctgaggaaatagacgccgaagatttttaccttggttcagctagcttcacaaaccaagccggcgatcctgtgatttacgattggcgttcacctatcgccgatgtttattaccagcaaacattcggccccaccagttatcaagctaacggtcgcgccattgcggtcaatctcgaccgacggcgccagttccaaattcaagctgatcagctaatcgatttctttgatacgcagattgccatcgaagatcccttgttattagccactttaaaagaagccaaaacaacgcaaatgagcgccattaccgcgacgattcaaaaggaacaaaacgcgattattcggcaacaaacgactgaccatttactcatcgatgggattgcgggcagtggtaaaacatcggtcatttttcaacgcatcgcctatttcaagactatatcgcccaagttttaccagacttaggtgaacaaacaccagtcaacttaaccctacaacaactattggcgcaattgttaccttctgatctagccgcactccccatcgctgatcaaccagctactttgaccatcacacaattaacgttgcaggcgagcgatttccaatctttaagccctggtttaccgctgacgattgatgccgcaacaagctaccaattcttcttaaaaacaccggtggataccccgcttgataaacgaatacaagcaactcagcaacaactcacaagttgtctacaggaaagcatcacaaatgaagcccaatcagcagatgctttaactcgacttgaaagcctcactgaaaccgagcaacagcgcttattcgaccgcttaattcgcgaagatgaaccactagcaccgctagcacgcaaaatgattcgtcatgattaccaagacttagctgatcagctaagcggttatcaatggcttgcttttgatcaaataattgcccgtcaaacaccgattgatgctgttattgcagctcagatttatgcttatttaacgcatcacgtcttcccaaacgttaagcaggtctttatcgatgaagtgcaggactatcacgcaagcacgttatctctttttaaacaacttttccccaaagcacagttcacggttttcagtgatcagcatcaaagtattaccccgcataaagtacaattcgaacaattacccaccatttttccacaactacaaactgcggcactgcgcacaagttaccgctcatccggtgcaatcacgacgttatttagtcagctattcaccgatttaacagatgtccatgccgttcaaccagcaggcaagcggccaacgacgatttgtgcgactgattttaacgactacctcacccaaatccaagctcagattgaccaactaccaactgaccagaccttagccatcatcacacctgctggtgattttgacgagcggttgactggcctcaaaaatgtccaccacttatccacagaaacgacgaacctccccgaaaccggcgccttcactttaccgctgacgctggctaaagggttagaatttgataacgttttgttgtacgatctgactaacaattattataccgagccaactgtcggccacaaccgcctctataccgccatttcgcgggcaacgcatcaattgacgctcagcgcactgggcaagttgccggttgaattaaatggccaataaattggtcatttgactgactaggctagtcctcaaaatataaacgctcgctgtcgcactctattcaaatacaaactgattgttgtacagttcggcgtagaagcctttttcgtctagtaattcttggtgactgccttcttcgatgatgcgaccgtctttgaggacgataatgcgatccgcattgagaatcgtctttaaacgatgggcaatcacgaaactggttcggccttggatgacgttgtccatcgctttttggatatgactttcagtcaccgtatcgacgttacttgtcgcttcatccaaaattaagagcgctggaccggtgataatcgtccgagcgatactgatcaattgtttctgaccggtactgaagatgttatcttcttcactgacagccgtttgataaccatcatctaacgtcataatgaagtcatgaatatgggcttgctgggcagctgccaccacttcttcatctgttgcatcgggtttcccgaagacaatgttgtcgcgaatcgttcctgagaaaagcacggattcttgcaacacgatgccgacgtgcgagcgtaatgcatccaaatccatttcacggatatcaatgtcatcaatcttgactgcgccttgatcaacatcatagaaccgattcatcaagttcatgacggttgtcttcccagaaccagttggaccaaccaacgcaatcatttggcccttatccacttcgatattcacatcatgcaaaatttgcttacctggtaaatagctaaagtcgacatgttccatggtcacggagcgttcaatgccctcaaattgcacaccgtcggttggacgcacttcatcgtcttcatcaaacacttcattcactcggcgggcaccggtaattgccaattgaatcatgctgtaactcgatgaaagttgtgcgatctggttatagaattgttgtgaatattgaacgaatgttacaactaagcccaaagcgatcgactttttaatgtcaccgttcaccgctaaccagctaccataggaaatcacaattgcggtattcaccaacgacatcccttgcatcaacggaaagatcatcccagaataaatctgaccttttaaagtcgccttgcggacattttcattatgttcaatgaagccatcaatcgtttcttcttgaaggctgttagtaataatcactttttggcccgtgattttttcgttaatgtagccattgagtttcccgacttcatcttgttgcacattaacgtatttttgcgctttattaatgatgatccaagcaaggatgaatgaaattgggacggaagcaattgtcacccaagcgagctgcacatcttttctaaacatcataatcaataaaccaattaagagcgccgtgcctgatacaagttggctcaacacttgattcatcgcattgtaaatattatctaagtcactcgtaaagcggctgagaatatcgccatctgaatgacggtcgaaatatttaatctgcattttttggagcttattgaataacccaatccgcatccggttggttgataacgcgttgacgcgtgagaaaaccgcgcctgataccaacgtcgctgctgaactaaagacgtagaataaaatcaacgatacaatcacctctacgaaggcgtctttagatgccccactggttggcaaatgttgggcttttaaaatttgaaatttcgttgcatatttgactaactcattgagcgcgtccccgatatattcgggtgctttcacctgaagataagtcgcaatcacagtcatcacgaggatgattgcaaaagaaggtttataccgctttagataatggaaaaagaacttcattgctcggttaaattctcgcattggttatcctcgctttcctttttgcgtttcaaagatttctcgatagacatcactggtttcaagtaattcatgatggttaccaacaccgactaaacgaccttcatctaacactaaaatccgatccgcgttgaccacagatgaaatcttttgcgcgataattagtgttgttgtgccagctaattcacggtctaacgcctctttaactaatttttcagaccgggcatctaaggcactagtactatcatccaaaatcagaatcttcggttgcccgattaccccccgtgaaattgagagccgttgtttttgaccaccagagaagttcgcactgcgttcttcgacggttgcatcatattgatcagcaagcttttcgatgaactctttggcttgggcaatccccgttgcgcggtccatatcggcgtcatccgcatcttttttcccgtgcttcaagttttgtgcgattgtgccggagaataaaatcgctttttggaggacaaatgaaacggcgctgtgtaaattatgttcgtttaaatctttgattggcacgccgccaattttaatctgcccttcagtcggatcgaacaagcgcggaatcaattgcgccatcgttgacttaccggccccagttgcgccgacaatcccaatcatttcaccagcgttaattttgaaattaatatctgttaacgtgttacgatcgtcttctggataacggaagctgacgtgatcgaattccaacgtccccgctaagttttgatcagggacatctggataaacgatatcaggctctgttgaaagaatttcttggagtcgcttcaacgaaactgccccacgagatgccatcatcatcatcatgccgcccatgatgatcgacatcatgatttgcattaagtaattcataaatgaggcaatcgccgcaatcgcttctggatccgtatcgactaagttcccaacgaaatagattgatgcgacaaccgctaagttcgccaccaacatgaacgctggaatcatcacagaaaaaagcatcccgacgattgtcgtatggtgttctaattgattgcttgtttttgagaagcgactgatttcgttatcttcttggacaaaagacttcacaatccgcgtgcccattaaattttctttagcgaggttattaatcttatcgattaaattttggatggcaccgaagtgtttccccatcgaacccattgataagaatgtaatgatgaagaccgcgatcactaagagcacgataatccaccataaactcggaatcgaattcatcgcaaggatgaaactgccgacaaataaaatcgggattctaaaaatcgtttggagcgtcatcataatgacgttttgaacctgggtcatatcattggtcaaacgcacggataaattcccaactgagaatttttcaatattggcaaatgagaaagtctgtatcttccggaaagtagtttcccgcatatcggcagtcattccctgcgccgtcatcgccgacgtaatggtgttgaccacgcccgcaattaaaccaaccacggcaattacaatcaaataaattccaatttgacgtaccttatcttgatcgcctttcataatcccttccaaaacatcttgtaatagttttggttgccatagtgaagacgcaacagaaataaccgtcgctaaaatggaaagactaaacacgccccaataaggctttaagtgctgtttaagtatcgacatgagcatccctctttttctgtagttgaatctcctgtacaaatcctgtacagtataatcgaacagtgttcgagttactactttatcaaattttaaaacgaattacaatcatcttttcataaaaagtgaaggagcttcattaatatggtaaaacagtcaatctctgccgagcaaatcatcactgccgcgtttgaaattttacaagcatccgggaccgtcgatgccctttcaattcgtaaaattgccaatcaattagacatcggggcggccacattttactggcatttcgaaaacaaacaagccctcctacaggcgatggctgataacattattcaacaaattgagattgagccatgtaacacaaccttagaatggacagaccaaattcgccaaatttttagcgccatttacaccacttacatagcacagccctatgccgctgagttgatgatgcggaccgtccctgcaactaaggcccgcctaggtcttatcaaccacttaattcaaatccttttggatgccggtttcacgccagaacaagcaagcctagcgattgaatccatcgatcacttcatgtccggtctcttcactgacatcaccggtgagcttgagatgaaacatcgcgtctcacaacataaagacacttatcttgcacagttaccgcttaaaatgcagcagattgcgactgacaatcattacaatgctttcttaaaaacttttgaacatcatcggcaccaacaacaacgctcactggaaaaattcatgctaggcctcgatattttcctcgctggtttgcaacaacaacttgcttaaataaaaagcgcgcagacaactgattgtctgcgcgctttttacatttaaactgcttttgaacgaatcccgaatccataactcagagccatcacgccgacaatcatgatcatgtataacggtaatcgagtattcgatcccgtatgcaatagactcatgccgtacgttaaggcgctgattgcgaggtagtagccaaaactaaacaacccgctggccgtgccgatcacatcttcgtaacccactaacgctaaattcaagaccaccggtaaggtcgtattcaatccccacaagaaaagaggccgtgggacgacctcttcttttgtgggtttctagctttaacgcgctttttgaaactgacttctgtgcttagctccaatccgtaaacaatcgactacgtcgctcatttacagatttaggctagtgctcgaagtcaaaccgtttcaaacgcgcttctatttctttaacgtgcttttaattcgcaaccttctgcgccttgctacatcaaccagacaatcgcccttggcgcttatccttctgattaggcaagtgctcaaaggctaaccgcgaattaacgcactcatttttttaccagcttgcttttttgacgcctgggatttggcctttatgggctaattcgcgaaagttgatgcggctcataccaaattgccgcatgaaacttcttggtcgaccatcgattacatcgcggttccgcaatcgcactgggctagaatccttgggtaattgagaaagggctaagtaatcgccctttgcttttaattctgcgcgcaagtcagcgtatttcgctactaatgcgcgttgttttgctaattttgccacttttgatttttttgccattgataaaactccttttttaccgtgctttcaaaagcatcctgttccggttagctacattagccaaacaatcggttacgccgctaatttggctaattaggctaatcctcacaggataaccacttttgacgcactcattttctttaacgtgcttttaattcgcagacttctgcgcttagcaccgtgaatcaaatcatcgacttcgtcgctaattcgcttccccgtactaatactcaaaagttgattaagcttgaacgcacttttccccgattgaaatagcctacgctaactatttatgaaatgcaattaaaaagacttataaaaagtaaccatttttcaacactggcctgtgctatacttaatctaagttgatttcacagaaaggggcactttcagatggcccaaaaaaacattctccaatacttaattctcgggctgttaaatcagtctcccaaaaccggttatgatttaaaacgcgtctttgaagatgatatcggtgagttctggcaagcccaacacagccaaatctatcctgaactcaagcgactcgaacaggctgatcggatcacccacgtcgaattgatcgccggaacaaaattaaaaaagaagcagtattcaatcactgcagatgggattgccttttttgacgagtggcgatactccccaaccagcgaaattattgccagcaaagacgaatttattttgaagctatactttatcgactcaaaaaatgatgctcatttagacgcaatgttcaccgaacaaaaaaacttacaccaagccaaactagatcacctactcgaccggcgtcaaacccttttcagccaacaagctgcggtggatgcgcactatggtcattatcttattttagaacacgcgattaaccgcgaacaagactatcttaattggttaacaaccgcacggccgtaaaatcgacccttaacaaatttgagataagtgctatcctattagtaagaagtaaatcaagttaggctgtttcttcatttgtatacgttataataacgcgcttgtacaggtggtcagttgaccaattgtatgggcgctttttttgtttgatccagcaacctagactttaacaaattcaggaggaatattattttaaagcgcaagaatgttgataaagtcgtcttcatccccacgatgttactgttcgggattgtctccgcatttttaatgttggggggtgacacgcttcagcagtcgatttcacaactacttgatgtgatgacggcacattctaaatggctttacattggtatttatatcattaattttattttcctattttggttggggtgtagtcactatggccatatccgcctcggccaaccaaatgaaaagccagaatataacgacttccaatgggggagtatggtttttgcaactgggattgacgctagcatcttaatgcttagtaccactgatccactgcaatacttacagaacccaccatttggcgctaaacctttctcggctgaagcataccgctacgccaacgtctgtgggcaatttcactggggacccatggcatggatgatttttgccaccgcgactgtcgcaattggctacgctctctatgttaagaacttacgggtacaacgtttaagcgccgcaatcgacctattagaaggaccacaaccttacaaaaaaataattcgcaaattaatcgactttaccgttgttttcggcattatggggggcatcggctcatcaatcggaatggaaattcccgtgatttcaaaagtcttgagcacaatgaccggtttgaatgataccatctggcttaaacttgccctcttcattatcttactggtgctattcaccctcacggtatatgccggcttagataaaggcattaagaagctcagtgcttggcatatctatactgccattggctttttattactcgtcttactaatcggtccgacattcaagctaattggcgctgaaggccgcgatatcttccatctctttggtaacttcgggcgtttaagtttaaatcagactggtgcacacagtgcgttcgcacaacacgaaaccctcttttactggggatggtggttatcttacatgcctgtcatgggcttattcatcgctcggatttcacgcggccgaaccattcgccaagttttattgggaatggcgacatacggcgcatttagttgtatgagcttttacgctgtacttggcggttatgcgctcttcttacaacgttccggtcaaatcgatcttgttcatctattgaatacccaaggacaagccgctgtcatcgcggcggtcatcacgaccttaccgttcaaaattatcatgttagcaattttctgtctgtcatgtttcattttcctggcgacaacgatctcttcttcggccttcatcgtctcatcatttaccagtcttgaattgaaaatcggagaacaacctaatcgttggaatcggatggcttgggtgatcattttcattctattttcacttggaattgtacttgtcggtagtttccaaaccattcaagccgtttccgtgattgctgggttcccattgatttttgtctgcgcattattgctcgtttcgatttttcacgccgttcatgatggcgagattcccattgaaattgaaaaagaagaaacttctcattttctgaaaaaaaagcttaagccgaaattttttatgtgatacggttatatctgttaacttttcagaaagaaggaatttaaaatgccaaccaataaaaaagaaggtattatttttacaacattaatgtgtttctgcatggtacttggaatgagtatctataacttagttttacatgatagtctatcatggggtgctttgtctaccggtttaattccaggtttcatcgtcgcatttattctagatgtattcgttgtcggtacaattgctaaaaaaatcgcatttagcttaccattgaacaaagaaaataaattagtcatgattctcacaatttcatgtttaatgattctcggcacggtcacatgtatgtcacttttcggaattctcatcgaaggtggtattcctgaccacttaggtagtgtctatcgtcacacatggttgatgaatgttatcgtcgcattaccattacaactgatcatcgtgggacctttctcacgcgccattcttggtaaaatccaagcaaacgcagccgcaactgaaacagctgaataaaaacaaaaaaaaacgacgactagcttacgtagctagtcgtcgttttaattatgctaatattttttgaatagccgctaattcttcggccgtaaacgttaagttatctagtgcatgcacactgtcttgtaattgactcaagcgcgaagcaccaactaacacactggctacagtcggctgttgtaaattccacgcaagcgccatttcagccaatgattgcacacgttgttgcgcaattttgttcaattcttgaaccgtactgattgtttgatcaaccttttcaggtgataggaagggactatctggacgagcttgcccgcgaatcagctggaatcccgtttaaataacgattggtcaataatccctgtgccaacggactaaacgtaattgcaccgataccttcatccgccaagacatccgttagtccatcttcaatccatcgatcgagcatgttataacgtggttgatgaataataaagggtgtcccgagcgctctgaaaaccttcgtaatcgctttggtttgttctgccgaataattcgaaatcccaatatatagcgcctttccttgttgcaccaataaatctagggcccgagctgtttcttcaatcggcgtatctggatctggtcggtgatgatagaaaatatcgacgtaatctgactgaagtcgttttagtgactgatcacagctagcgataatattcttcttagagccccactcactatagggaccgggccacatataatagccagccttcgatgaaataatcatttcatcacgatagcgacgcagattatcatgtaaaatccgcccaaagttttcctcggcgctgcccgctggtggcccctaattattcgccaaatcgaaatgagtgatgcccatatcgaacgcgccaaaaatcgtttccttttgagtcgccatcttatcggtttcaccaaagttatgccataaccctaatgaaatcgctggtaatttcaacccagaatgtccgacgcggttatattgcatcccttgataacggctttctaatgtgtgatacatgtacaacgccttctctactcaagtattttgactatttagccgatcgtcttaattgcgtcttccactaatccccagaacttctgatgatcgagttttacagcgactgatgtgtgacagtctgttggaattgggaatctaaaatcggcgaccgtcatcccacgcgtcaatgttccattgagttcgatatcaacgggcactttcttagtggtcatcacacttggatcaatcacgtaagccacggcacatggatcatgaacgggcggtgcatcgaaattttgccccttcttgtacatatcgcggaaaaaggctaacaaatcaaccacgaactgagacgtttcagtatgaatgccttcaatttgttcaacaatatctggtgtcgctaacgcttgatgcgtcaaatccaaaccaaccattgtgacatcccagccggcattgaatacaatcttggccgcttctggatcaaatttaatgttaaattcggccactgcactcgcattcgcttcgtgataaccgccacccattagaacgacttctttaacgcgttcaacaatcttaggttctttgcgtaccgccattgcgatgttggtcaacgcacctgttggcactaatgtaattgtattagctggatgcgtcataattaaatcaatgattaaatcaactgcatgacttttttcaagcgccaccgttggttctggaagaacaaccccgtcaaggccagtctccccatggatatcagctgctactttaatttcttcaattaatggtcgcgaacacccagcagcaatcggtacatcgtgcatgccgatcatggtcgcaactgcgagggcattgcgcgtcactttcgttaacgtctgattggcagccaccgttgtcactgccaacaaatcgatttctggattgccgtatgctaacatcattgcaacagcatcatcatggcctggatcacaatcaagaattattttctttgccattcgtaaaacctccactctctttcacttcgtgcatactatcactatagaatttaagcggtttcaagtcaaccatatataataaaattcaatcatgaaacggagtctattatgcgcattgatactggcgaataccctaccggcgaaaacgccgtccaccctaagaaagttaaacgtttaaaattacttagcaaggttgcaacaatcacctgtattacgatgtatgtttcatacatcccccaaattatcgctaatttttcagggtcacctgtctcacctttacagcccttagtcgcaacaattaatgggtgtctatggaccgcctatggctggaataaaacctataaagattggccggttattatttctaacatccctggcgttattttcggactcgttaccgtaataactgtttatattcactagaattgtttgttaaagccacgatttgcgtcaaataatttttgataactaacagaaaagcaatccatcataagttgcttctctgttatttttttatccctttacccaaacataaaaagccaaggtgattccttcttttatcgaaagaaaaccatcttggcttcactttgaagtaccgactatgggactagtcggccttaagcttgttattttgctgctcgtttaacgtatgtgccttcttgtgtgttgatttcaaggacttcgtcagcgctgatgaaatcagggacactaacgactaaaccagtttccatcgttgcaggtttacctgaaccagtcactgttgcgcctttaatcgaaggttgtgtttcagcgacccgtaagttaacagtagttggtaaagtaaccccgatcacttctgaaccgaagaattgaatcttgcagttcatgttttctaataagtattttaattcagcttcaatagcagctgtttgaatttcatattgttcgtaagtttcaagatccatgaagaatgccacgttatcttgtgtgtataagtattgaacatcttttgtatcaatcattgcttgttcaactttaacttctgggcgcattgttgtttcaacaattgagccagtccgtaagtcacgcaacttaacacgcataaccgtgtttcccttacccggtttatgatggttagcttctaaaactttgattaacttgccgtcttgttcaaacgtcattcctgctctgaggtttactgcttcaatcatgacttgatctcctttatttaaaaaaatattcatctctaactgtaccaaatgaaagccgtttaatccagccctcctgtggtagttatcctatttaatgtcgagtttatgaatcttatccgttggttgtggctcataatgttggtacatcttcgtaatggccaccttaggtaagcctgattcactaatataaatattaggtttgaggtatttcttattttgcacatcttttaagtgataatgttgaatcacttgtttctgatggccagtcggcgcttcatcttgaccatagaattgaatcttggctaatggtaagctaatcgttgcattattaatcttgaaataagcaacatctcgattgctgccaagatacgtcatcttttgttgcttatcagcttgatagaattgctcgatttgcttcatgctgtgattatcgaccagccggacaatcggttgatcacctttgaaaaggtgtaagccatctagcgactggcgcacgttttgagcactcaacatcaaccagacaatcaccaacatactgataaagtacacaatatgtaagctaagactgctagcagcatgattcaaactaaaagtgtagctatcctctagctctttattcatgatttggcgccgaatgcgcattgcaataatcttatacgataggtaccacactacaagcgcgactaaggttgccccaaaagctgtcaaaattgtattttttagaatttctgaatccgtcaataatggactaaagccgctcacaagtttaattgtgagcgcgccaaggattagaatcacaaccatttgtagtacaaaaaaacgggtccgaatacttttgctaatcttcgtgggtgttaccactttcgtcttatctcccataccataaatcctcccttgttaacctacttaccattttagcataccgtttccatcaagttgattaaaagtccctcgttggcttattttttacaaaggcatgtttcttcaaagttagctgttcaatatgataagatgaagttaatcaaacggaggtgtcgatatgttatatccagaaagtttaactcaattactcgccgattcaaatcagccagtcatctcgttattcattaacttagagactggcggacaagccattaatgcgaacaagattaagctcaatagtttttctaagcaaatccgtgaacagttaaccaccgactatcctgaagaaaaaaccttactcaaccaacttgagggcttactaagtaccgctccccaagaattagcacatatacagtcagttgcgttttacatcacagctgctggtcactacagccaaccccttcattatccgatcacgactgaatattttctaattgctgatcaacccgacctgcgtccactcagttcggaattaagtctgagtctgaacgggaccattctctgtctcaacaagactacttttagtttgaaatccattcaacaaaatgtcattcgggattatcctttacctaaagacgccccaacaaccattgaaattgggattggcacagagcgtaaaggcgaagtcgtccaaggcttctcaagtccaacccacagttttgttgtaaaagaaaatgaacaacttatcgatcaaactaactatttccgcgtgattggccgctatcttgatgacttgctgcctgaaaaagcaccgatttacgtggtcacattacccggcaacttaaatctcttcaaggaactcgtcgttaatccaaactaccggatggatcaagccatccaaacttcccctgattctctttcagatgacgacttactcgacaagttactcacaaatgcgcgtcatgaactccgacaaaaagcgctcggattagcagaacgggccgctagtgcgtatcacggcgattcaaaccttggtgatcctgagattattctttcacgcattaacaatcgccaactaacagcactcattatcccaactgcacttgcaccatcagcaacaatcagcgccgatcaaatcatggatcttaatcacatgatgattgcggccatccaaaccggcctgccattctacccagtaccagttgaaaatattccgacaggactggtggcgatgggaatttaactcttaaaacacgtgccaatacagcaacgtatattcaagcgttgttgtactggtccgtgttttttgagttgcaaatacttgatctagataagctgccagttggtccgttggtaattcttcgtaataggcctccaaaaatggcctgtcgaaaacttcacttgtttgatattgaaaaatttgttgactaacttggtagcccgcatcttttaacacgttttccacagctgggatgatttccggtgtagtgttgggatcttgctgttcaatcccaaaataacgttcaagcggtgtgaacaagtcgtcctcgtttttagtgagccgtaagaatgcacaccactgacggctcttttcgctaatcgtcagtaatgcttgattggcttcgattgccggatttaacgccatccaaattaaatcatagcttttttgtggcgtttgcgccataaagtcagccacagactgctgttgataagcaatctgttggtctggtacatgctgtttagcttcttgttgtgcatactggagcatttgcgccgagatgtcgataatcgtataagcctgactgttttgcactagaggtggcaaataacggccgctaccaccacctaagtcagccactgtctcaacaggcagtaatcgccgatcctgtaaaaaagccacaacgtcagtgacaatcgacacctgtgactcttgttgaatctgatagtattccgctgcaaaatcatcccaaaaagctgcgacttcattatccacaatctatcctccgcttaaacttttattttctcagcttagcatataaaaaagatgccgacaaaataaattatcgacatctttttgaaacgtgctttttggttgcaccaacctccgcttaatctaaaatactcagttgctatccgcgaccgaacacacgcttttttaaacgtgctgcaatcgccatattcttctgttgttaggctaatcctcagaatatctccggcgattttcgcactctttatctcactaccagcactgggattggtgcgtattttgccatgtaggcggcttggctgccgaagtatttagcaacgcccttttgtgatttcgaaccgacaattaacaaatcgggtttaaccttaggaatcacatcttcgataatcgcttcgcctggttcgccttctgcaattactgttcgcacatgattcacaccgcgcacataggcttgatcttgatattctcgtaggtggttttcaagatcctcatattggccgtggataaaatccttgttcaatgcttgatagacgttcatttcgtcattttccaataccgatacaatgactaattctaaatcctcacgtttagcccgctcaattgcataatcaaacgctaataacgcatcctctgagtcatcgaccccgactaaaattcgtttaatttctaaaactgacatgtgaccaacctccaattaattttcagttgctaattgctgttcaaaccgcttattgcctttatacaattcaataatcatccaaaccaataatgccatcacaccagcaatcaacacatatgcaatgcgatcagcagtagccaattgtgcagcacttgcgtgatcaccatagaaagcttcgatttgtcctggcaaccccatcatattcaaataggtcaagccaatgaccgataaccaacctaagcttttaatcaaccaactattcttgaagcgatcccccatctcaacccggctgtcggtaaacatcaacagtggcagcattgaaaatggtaaggcaaacgctaagaaaacttgggaattattcatcaaggtattgagcgcctcatgctcttccaaggctggtttattgctggtcatcatgacgcagattaataccggaatcaccgataacaagcgggttaccaaacgccgcaaccacagtggcattctcaagtgaatgaacccttccatgatgacttggccagttaacgtcccggtaatcgttgaattttgcccagaagcgagcaatgcaacggcaaacaaagttgataagattccggtccgggcaacacttgcaagaattccgttactcattgttgaggtatctgacaaagctttaaataacccgaagaatgatggatctttaaccgttcccgttttaaaaactgcaacccccatgattaataacaacgcattaacgaaaaatgccatcgtgagttgaatgtttgaatcccaagtggcaaagcgcactgtttgtgcaacctgtgcttcgttcttgcgatcaatcttccgtgtttgcgaaatcgcagagtgtaaatatagattatgtggcataacagttgccccgataatccctaacgcaccagtcaatggggttagtccaccaacagctggaccggtggcaaaggtcttagcagttggtactagcccaacaatcacccctgcccaatcaggatctgagagtgctacttcataagcaaaaaccacaaaaatcacgacaattaatgcgacaacgattgcttcaatcttacgaaaaccaattttcgttaagagtaataatagcatgacatctaaaatcgtaatgaatactgcaatcagcagtggaatcttaaataataagtacaaagcaattgccgccccaataacttcggcaatatcggttgccataatcgctaattctgtcaaaatccacaagacaatgcccaacggtttactcgtccgtgcgcgaattgcctgtgctaagtccatctgagttacaatgcctagtttagccgccatatattgtaataacatcgcgattaaactagacaccaaaatcacggacattaacaggtattgaaaactctgaccaccagtaatcgatgttgaccaattccctggatccatataacccactgccaccaatgcacccggtcctgaatacgctagtaacatcttccaaaagcctttgccctctggtacttcgaccgtcccattaatttcttcaagtgatgggccgttcgcatattcaatcagcttgtgcttcttgcccttttcttgttgattcattatcctcactccttattttgatcttgataacagttttattgtacgccgttttaatgaaatgtaaataaaaagttaggcaatgctaatttattttattcaaatcgataacaaatttattaatgcaagctacaaaaaaagcgccgtcgaaattattctcgacggcgctttacatactgctttaatcatccatttctttttcaagtagcgcgccagtttcagcgtctaatttaacttgcattttttgctgtttttgatgaccttctacttcccagactgttcggccatcatctttttccaatgaccatttgatcacgttcccggtgaagtattgttgcgctttttgaagagcttgttgaggcgtcaacaattggtcaaacgctaattgcttttggtgtcgctcgacgccattttgttcatcggcatcaagggcttctttcgacaatcgactggttgcgccagttcgagcatccacatgcatgtgaagctcttcattgtcgttcattcccgttaattcataaaacatttggttaccccattgattcagctcaacctcggttaaatctgatgcaggatattgttttgcgtacaattcacgggctttttcaagcgtcactttcggagcttgaaccgtttgttgcggactagtcgattctttttgagcggggggtgctgaatgttttgtttggttggctgtacaacccgtcaataggccgagcgttactaaactaacaatgattgttgttttgcgcatcctgttctacctcgctttgttttgatacttaaggataccatccaacagggtaaattaaaaagcaatatcccttcctagagcaatgttgtccccactttgaccaataaaccaagcccatacacgatgatgatgatggcactcactaagttgacgcccatcaagaattttggtgaaacttttttccggaaaaggctaaagataatggcgataccaaagaaccaggtcgcggttgccgaaacaacccccacgatgaatggaatcgcctcgctactcgtcatgccaccccgcaatgcgcccagcattaatgtcccatcaatcaaggcttgcggattaccccaaaccgccacaaatgcagtcaaaataaccttctccagtggcattggttctaacgcgccaaacgtaacggtactgcgggcactttttaaaatggtgtatccaatccataaaatcaaaagtccaccgattcccataatggctaaccgaaccgcatcgttttgcacaatcagtgcgccaatcccataaaacgccacgagtgaaaagagcgcatcaaataaccagatgaacaaactgttgaaaactgcccgccgtgttgtattcgacatggcattattaaaaacgaaaatattttgcatcccgattggtgcgacaaacgcaaatcccatcaagattccttttaaaaagaacatctattaacctccttggcaagttacctttcagcgtaacatatctaggctaaactttcttgtctggatttaattgtaaaatcagcatcgtcatcaacaagaataatgctgataaaatcaacgtccgttctcctaagaatgagacacatagtccgaccatcactgcaccaatcgtaaaactgataatgatgcgtaaaatttgccagcccttatcggctgccttacgatcatgtttaaaaacagcgtcataaaaactttccgccatcgtccgtacatttccagtcatcatcaatgatgtaaatgggccaccatccaattcacgaaattcctgtaattgcgcagccgcaatgattgaaacaagtgaacttgcaacaatatccggtacatacggtgaaattcccgcaacaatcgttaagaccaagacttcaatccccaagataatccgttgtcgtttgttaatcgattcgtctttttcaaaccgatgttgtaaaatgcgcgttaagattgttcccaacataaaggcgagaatcggggtaatgtgccgtaataatacggaccatttcatctgccccaaatgggttcctaataaaattagattccccgtttgtaatccggcgaagacttccccgtgcaccaaataagtgtaagaatcaaagccccccgcagctgccagtagcccgccatataataatttgtcgctcattgtcattttgttccgcattaattcatcctactcctcaactaaactataagtattaactctatcggaaaaaccactcgccgtctacaagtagttatcatttaaaacgttatcaaaaaaaggcctcagcaaactgattttgctaaggcctttttggcttaattttctacgtcaccattgaaaccggctaattgacttgaataaattgataaacgcgtcgcataactaggatggtcattattttccttgaccacttctttaagcgtcgataattgatcggtaataatgccgtcaacgcttgtaaataacatgcgttgcatcacatcctcatcattcaccgtccaagcatatactgtctgccctttgccgtgtgcttgacccacaaaatctgagtcgagcgtcgtcgcttccatcgtatagccattagccggcgtttgggggaatgtaatgttatacggcagaataaaactaacaaatagttggggtgctttttgtttaatttccgccacaatcagataacttaatgaatgaatccggttatgattcttcaaaagtcgtttttcgtatttatcgataaagtgttgcaccatctgtggactgtcttcattcgttgtcttaatttcaacgagtagtttttgatggtgcttttcggctgctgctagatattgatcaaaactagcaacctttgcagaatgaccattttcacggacagtcaatgccgttaattcagcaagtgtcatgtcatggacgccgcgatcgacacccgccaagtgttttaaattatcgtcatgcatcacgacaaattgttgatccttggtttcatgcacatccatttcaacataatctggctcttcctgcgccgttttttcaagtgctggaatcgtattttgcacaccattaccatcatctaccccgcgatgcgaaatcaaggccggttgatcgtccaacattccctctaaatagacataattgtacaatgctaccccaccagccacgataacaattaaaccgattgtgccaatttggcggagaatcgtcaaattagtccgttttttcaccttagattggcgcacaaccgtcgccattgctggaacttcaccatattggttcaatacaatctgtaagactagtaccaccgttaatgcgagtaaaatctgactgacgatttctaaaataaacagattcaaaatggctaaaaataaagcctggtgtggcaagtgttggtcgtaataccgttgactagcaaacaaaattaagcggaagcccactccaacaattgctaccgacgttgttaatacaaagccttttagaaaaatacgccaagcctgatattgggtagcttgccaacagcgtttgagcgtggttcttagctgcgcctttggatgtgcaatcgtttctggtaaaaacgtgattaagcgaattgaaaggactaatgcactcgcgtagaccaagataatggggacccaaattttgggtgatgaccacatatcctgaataataaaatctggaacggtcaccttggataacaacgctgatttaaagaggacctgtccaaagggtaagattaataagaaatacagtaaaccaaccaacatcgtggttggccgtaaagcgactaatccccggactgtttccttaaaaatcatccagtatgtttcttgtgtttgcttttgaatatggcgcatactgcgcaacaagaacgtcatttgcagataaactgccgcgcaaatcaagaccagaatgattagtaagctaatcagtaaaagcggatgacgcatcatcaccggcaccagattggtgtaggttaaatacgtcacgccattgagtgccaccaaccgttctacaagccacgtaaacagcggtgccaccaagctgccaataattaaattcgtaatgacgagcagtaataaataaacactccaatgttgtctaaagagccgataattagcccttaaaaatgatgttaaacggcgcatataagttcctcccgaattgttacgttaaaattggtaataatgaaatcatcagataaatcatgctactaatgagaacaatcgcgacacttgtccaaaaattacggtgcttttgaaaatgatataaggccaataaactgccccaatcgagcagttcttgacttggaaccgcaagccacgataacgtgccaaatattaaaaaactgacaacgactgccgttaacaagcgcaagaaccaaccggatacccgtagactttgtaagattgtattcacaagctgaccagtcgtaataatcaccatcatgtacaaactaatgaataatatctgacaacaaaagaaccatgctaatgtcggccagacctggttctgataaatcaaggctgcgtaatcatttattagaccgacttcaagtgatttaagcagtacctgatacattaaaagggctccaacgattggaatgccacaaaggagtacaattgcaccgatagccccacgaatattgcgccaactaggaagcccaaatgaaccttcttgtgccagccataaaccatcaaaacgcgtcaaccaccatcctagcgcaatgactaacaccaagtaataagcaaagcttagaagacgtaaccaccacggttgtgcggctaactgcgcaaagtctaggttaaataattgcaacagtggttgattcgtattcaaaagcgttaacacaaagatcaaactcgcaaggattaatccccatgtgcgcttactgagcttttgcatcatcattttgctttgcctcctttaccagagtatcaatatcaaacgatacaacccgaccaatccgcgttttagcatttaatgcataggctttggcaccagattcaaaaaccgcatataaccgattgccatccaacgtaatctgctctaaatgagctggcatccgaatcttaagtagcgccttttctggcgtaaattgttggggccgcccagtcgttgcaaaaacgtaaatccatgaatcgtctaacccgtaggactgcgaaaaataagcccgcgtatcactaaaagttagcccttgaatcttatccactgcttgccaacgttgttcacttttaagttcattactgcggatattccgcgccgtcaatttaacaccagctttttcgcgtcctttaatgaccgctgaaacctgaaacgactggacgttactatccccgaaaatattgaaatagccgacccataatgccccatcgtgatagctaacaagtgaagcccgggtgatcgacttcaacaacgttgaatattggtattgaatcggcttttgcggctgatctgcagggtactggcgaatagttgttaacttaattgcaaatagctgtgcacgtgccttcttacggccacaaacccataagagatcatgttcaggatcataagtaattccaccaacgtgtggtcggccctttaaaataatattcttcaaatgtcggccagtccgcttatccataatggacagaattgagttgccttgccgttgatggtcataagccgaaacgatcacatagtccggcgtaactgttcccccttgaggtgtcatcatttctgctgtatatgctttgtaacctgccggcgtttttttcaacatctgcgcctggtctaaatctggcaccaagtaagttccagattgggttgcctttgcatactgtccaaaagaagccggcgttaacccttgatagtaacccaaatcccgttttagatgagggagtgtaaatcgcgcataaattacctgtctagattgcgtgattgcctgttcagtaaccgtcttagcaggaccgaaaataagccacaaagcagctgataacaaaagcaagcagccagttaataaaaaggttgttcgtttttccaaatgcatcatcttactccttatccgcaacaaaattagatacttgttgattccctcagtataccaaactctgaatttaatgtacccctttaacgaatgaacgaacaaaactattagatgcacacaaaaaaagcataaccaactaagtggttatgccttttttgtgatggctaatactttaactttccatttatctctagaatttcatcaatatggtttgcgtatcaatcttcatatgcctgaccgacaagtgctaatacctctctccctttgtcggtaaccgccaatgatacccgtcgctgatcatctggtgtcccaaattctttggttatcaaacctttccgataaagagtgttgatcttgcgtgacgttttaggagcgccaccactaatttccttagcgagttgtcctggcgtaatcgcttgcttttcttcgattaactttaagattaaatggctgtcaaaactaacaccatattcttcaccaatttgattgagtttaaattgaatcgttttgattgcattgacccaatcaacaaatctgttaaatctttctttgctttatcttcagtcattttatattctcctactaaactctgttgccatcatttgtaaaaccaacatttactaataataaattagcttataattaagcaatattataattattattatctagttcatcgcgctattatcttttgtgcaagtcattatagtcttaatttcataaaaagtaaatattttttaaaaacttctacgacaatcaagattttcggcagtgattcatttacaatttaccaaaatccacatcaataaatacctttttatgactagagttactcagatgaccttctagatttgatttatattttgtttataaaattgattttatttcataaaaaaaggcccgcatctaggatgcgggccttcaatcattaatgtctagttatggatataagtaaatgccccggcatttgaaattgtttgggtgttaggaccagcagggttgctgaagcccatcccaccttgagtgatggtaattgtcccagctgcggcatcgtatgattgaacgtaagcaacgtgaccatatgtcccatctgcggcccaagaacctaccatttggccaccagcaaagctaacgattgcgcctgctgctggtatatggttaactgtgaagccagctgctgcggctgaagcaccccattgagcgccattcccccagttattgccagcccaaggtgctactgacttaacataccatgtacattgaccccatgcatatgaattcccagctgaattaccagcaacttttccgctgccaccgaaaacagatgtgccacccttattatctgatggcgtgtcaattgatgtaggttgaggtgtgtcttttttagcattgttggcatcgtctgcagcctttttagcagcagcgtctgcttcttcagtacttgctttgtcgaagtctgcttgtaaagctgttaattcgtctttgttatcattgattttttgtgataaagctgtttgtttttgatcagcttcactcttcaatgattctaagtttgctttttgtttttctaaatcagtcttagtagcaactaaacttgctttagtattttcttgttctgtcttcaagccgcttaattttgccttagcgctgttaacatcatctaaagcttctttacttgcttggtttaatttattaattgtgaatgaacgcgaaactaaatctgaaaggtcatttgagtttaaaaggaagtcaacatatacgttcccgctgacagcatccccactcttttcttgtaaggccactaattgtttcttcaatacgactgttcgtttagaaacttctttttgagcatccgtaatttgacctgaaagagattcgatttgattatttgctttagtaattgctgcttcttgatcagcaatttttgaagcgtttgttgaaatcttttgatccaacccaatcacttctatattagctgattcgatttgtttgagtaaatcgtttgttgcgttcttattagcagtaatcgcttcttgtgcttcacttgaagttgcagcagatactacgtttgttgaaagaactgaagctgttaataatccaagagcaattgtagtcgtaatcgtttttttaaatgacatggtttattttctcctattagttaagcccgaactctgagactaagtatatagggcgaatgttacattaacattacataaacattatgcttacttaacaaatcataaaatataggctttgtaagcgccttttacgactttagaagccgatttcagagaacccttccttattatttccttatcatatttaaaaagatgacgccgaattcattcagcgtcatctttttattagtcatttataaaagtcacttcttcatgctgcgtccaactatccaagcgcgcacttttcagttcaattgcgtagataatttcccgttcacgatcttctgctgataaactatccataaacccagggacttgggcgttgtaataatcagctaattcatctaacttgtactgcgcgcgataaacacgcaaccggctgctagcaatcgtcattccttcgctagttggcattgtgtgaattgccgctaaaccacgatcgagttcttcaatcttaggggtatccggtgctgtcccaaaataccaaatattcggtgcatcatccaacacgataaaccgcatttggcggcttgaaggttgcccattttcatccgaagtactgagcatcatttcatttgtttgattaacgaacttctgaaatttgcgcaaatcattttgatgaatatgcggattagcgttttgtttatcaatatacgcgattacttcatcgatcgatgtaaactgtggttttgtatgtaaaaaatacaaaatctgtggaatcattcgcgaaatttcccgcttgtgataataaaattgtaaccaccgcttagacgccaacaatgcccctgcatactggacacgcaagcggttattatagtgtttgataaacaattgcattggattatagcgcaccaatttctgccaaatataaaaattgaagaatagtaaaatcacggtcatcaaaacattcacttgaataatattgatgacggataaattaccgtatcgtgcaaaagaagtgtataacacccaaaaaccagccgttgttaaaatagcagcgtacatcactaaacgttgcttaaacaaccgtcgcttatgcataataaccccaatcacgcgttggcggtttttcatatttcgctcacgaacaatcatgtcatcgacaattgcttgatcttttttagaaagcatcttcttcctcctcaaaataatcaaatctttgccgtacttcataggtgcccacatccgtgtaatctggaatgataatctgtggttgttcgtgccgcatgtctaatggaccatacttttgtaagtacatatcctctgctagatcgatgcgctgtctcaatcgcgtcggatcatacatccgcagcaaaccttttttcaaacgatattttcgtaatttattcaatagaaaaagccctaaaaagaagactgcaaatacggcaacgtataataaaaagtaataattagtctgtaataatatccttctaaaggccattaagtcaactggtagcggaacacttttgacagtatataagacccccgtaatggtcatcggtaccagacacattaaccatccaatggcaatcagaatcccctgccagatttttttgcccgtctttttcttagcaaaaaaccaatcattcgtcaacgatgcctcactcacttgatgcgtgatatagtctggtttagtcatcttgattgccctcctcttttgtcttagcgacgacctctaccgaacgttttggtgacttccaaacgccagcatcctcgcctttaagaatctgaataatcgttggtccgatttcaaccgccacggtgaaagtattcaccatccaatagattaggatataccatggcgcaaacgcaatatactttaatgatcgtccacggtcattaaagtaagacgccataatcaactgaattaagcccaccacaatctcaattgaaataaaaatcgctgcaaagcagaaattggtaattagacgtgaccaatccccttggaccaagcacaacacctgaacaccaacaaacgcaatcatacttaaccagaaaaatagcgaccaaataacacttaaactgtaatcaacaataatgggtaccattgccaaatgtttaatcgggtgtctaaagacatccatcgatttcgttaacaacacatgaatcccaccggcagtccaccgtctccgttgtttgaccaactcaggcagtgtttcaggcacatccataaaaaagcgaatatgtggtgcgaaatacgcttgccaaacatgcacctgcatatcccaagaaatagcgatatcctcagttggttgttccgcttgccaacccccaacatctaagaccgccgccttacgatacatggtattagcaccagaaaatgcaaatagaccaccgtatgaaagctgcaaacgtttaatcagtccgatgatcgagttcaattcattttgttgtgcttcagctaccaacgatgttttgttgattaataacatattgccagtaatggcccctaatcgatcgccaccttctcgttcgaaatagtgcatgtatttccacaatgcatccacttccggcttagaatcggcatcattcgataataaaaattggccttttgaaaatccgagtgcaatattaaacccagcggctttcccacgattattaatgatcgtaatcacacgtaagcgcttctcaccataccgagtctgcaaccgattcaaaatagcacctgtttgatcggttgaaccatcgttgaccacaatcacttcatactgattggttggataattcattcactcttcaaggtgttcaattgtcgattcaatcgaagcttcttcattatgcgcaggcactaaaatagtaatgaatggcgtccctttttctaagtaacgtggcatatctttgcgttctaaaaataaccagtaataaagactggaaacaatgaaagataaccccccgacgattggatacgacacaattgtgtagatgagtatccttgttatgtaatctgaaaaagccatgtagtcttcacccagtccttattgttgttcgattttaatagacgccaacttcatcacggacaatcaattgctctgcaaccaatacaataacacatcaggttcacattattaaatatatttatttgaaattttatcaattttaaaatgaaagcgtatattcccatcgagaattaattatattcttatttttggcgtacttaacgaatcgaagctttattttttgttgtaaatgcaacaaaaatattttatactatttttatcgaaatgaggtatgccatcatgactgaaattctccgcccaatcggggttatagcccgcgcgttggaatccattgctaatattgaattccaacaatatgatttaacccgcgggcaatacctttacttagtccgcattacagaacagcctgggatcattcaagaacgtctaggtgaattattaaaagtcgaccgcgcaacagtcacgcgcgccgttcaacaattaattaagcatggtttagttgaacgataccctgacaaaaccaatcgtaagatcaaacatctctatctcaccgaggccggtcgagccgtctatcccgccatcaaagctgaaaacgattattcaaatcaaatggcactgactggactgacgaccgacgaggcccataatcttgaagcactcctaaacaaagttagtgccaacgttgccgcaaactgggattttgtcaaaaagggacacgtccgacactattacaacaaaggaggcatcacaatgccaattcaagctgtcacattaaaccaactacctgacttacaatccatcagccgtgaaactttcacagcaacttttggcgctgaaaatgcagcagaagatctcgctaactacttagaagaagcttataatacagaccgattaactagcgagctcgagaatcccgattcgttcttctattttatttatcaagatggcgaagtcgctggttatttaaagctcaacattgatggcgcacaaactgaaaaagctgccccggattcactggagattgaacgtatctatattcgacagtcctttaagcgacttggtttgggaacacaactaattaaccatgcactagccgtggcgcaacaattccataaaactaacgtatggctcggcgtgtgggaacacaacactgctgctcttaacttttacaaaaacctcggcttcagccaagttggtgatcacatcttccaactcggaagcgacgcacaacgtgatctgattatgcaaaaaacattaaccgtttaaacacacaaaaagaggcaacctatcaggttgcctcttttttcgattattgatgcgcacgttcatattctgtatcacagtcagctgtaaaaatggattctgttccggcttcaagtgcctttgtgtaataccattctttatgatttagcttcgtcaattctgcttgcagtgattcaatctcgttagccaacatttgccgccgttgttgaatcaacgccaagcgttggtccaaaatttcatcacctgcagttcgccaatcgatgtattgcttaatatcttttaactgtgcatacccttttttttcaaacattcaatatcacataaacagtctaaatcagcttgccggaattcacgccgaccagccggactgcgtttaataaacggtaataatccttgttcttcataataccgtagtgtcggaatactcaaatcatattgttgggcgactacgccaattgataatgccatattaaccttccttatacttgcttaaaaatcaacgtcatctggcaccatgcattgaccgcctaagttttccaaagcactaattcgggtcatttcactatctgttaattcaaaatcgaagatatcggtattttgcgccattcgttcttgatgagttgatttaggtaatggtaacacaccttgttgaatccccccaacgaaggcaaacttgcgctgccgttttgccgtgcttcgtcgcaattgttgcaatcgtttcattcgaaagcgcactggcttcaccaagtggtgcccaagcttcgactaagatgtcatgcgcttgattataacgcacagcttctgcttgtggccagcccggatggacttcgatttgatcaaccattggtttgataacggcagttttcatgagtgcatctaaatgatggggcataaagttcgacacaccaattgcacggatcttcccttcgttatatagatcttccattgcacgccaagtttcagcatttaattcagcatctttggcttcaaattgtttagtgttagctggccaatgaattaaatataaatctcaatagtcaacacctaacgttgcaattgtttgtgcaaaggcagctttcgtagcatcatagccccgttctgtattccatagcttacttgtcacaaagatgtcttcacgcgcgatatcactttctttcaaagcggcaccaacaccttgttcgttgccgtaaacggcagctgtatcaatatgccgatagccaactgataaagcttctaagaccgcttttttcgtttcttcatttggtgtttgatatgtcccataccctaatcctggaatggtaacaccgttgcttaaggtcattggggctgttaaggcagataatttttgcatttaaaagtctcctttttctaatcaataagactactttacaacctcaagctgacttgaggtcaaccattatttgggggcctatcactttttttaaatccgttagtgcttccctaggaattatgcctgactaataagagccttaaactaaacttaactattctgatttttagcggcctaatcccatcaataatcgtatcatgaccactgacaattcctatgtaagggttttatcttcctattttaggaattcgcggtataatatagatatcaaaagtagttaatggaaggaagcgagaaacatgaaaaaatttctattaggcagccttatttttgtaggtgttacagcaaccggtgcttgtttattagctaagaaaatggaactttttagagacgattctgtggattacgaaaaattcgaaagccgttagtcactcgtcatttctaaactgaatctaggaggtttttcatatgattaagaaaaaagcaattatgattggcgctggcctttctaacatggccgcagcagtctatttaattcaagaaggcggttggtctggcgatgcgattacattctattcattagatgaccatggttcaaacgatggggcatcagtttccgaaacaaccgatgaatattggaataaaaaccatcctctcgaaaatactaagggctacgttgcacgtggtgggcggatgcttaactatcggacttatgtcgatttaatggatcttctaggtcggattccttcagcaactgaacccaatatgacggctgaagaagatacccgttcattcgatgctcaacaccgcacattcgacaaagcacgtttattagaaggtagtaaaggtattttggatgctggtcatctcggctttaataataaggatcggttattaatgaccaaattgattatgatgcccgattctgaagaagaaaaattagacaacatttcaattgccgaatacttcaaggacgatccacatatgttccaaacaaacttctggtacatgtgggaaaccacctttgctttcagaacccaaagttccgcacaagaattacgccgttacatgcaccaaatgatttatgaattcactcagattgaacacttagtcggtgttaaccggacacgttacaatcagtacgaaagtatcatgctgccgctgattaactacttaaaagcgcaaggttgtcacattatcctcaatcgacggattactgacttagactttaaagagactcagatgaccgatgaaattacggttactggtatgacaatgactaatactgagacagatgaagttgaacacgttacggtggacgacgacacagcggtcatcttcacaaacgggtcaattaccgattccgcaacacttggcgattataatacaccagcagctgaaaacatggattatggtgctgctgccggtctgtggaaacaagtcgcttctaaattctataatcttggcaatcccgataaattcttcgctgaccgcaatgccagtgagtgggtcagcttcactttaacgactaagaatcatattttgttaaacgaaatcgaacggattacaacgcaaattcctgggaatgctttgaattcgttcctatcaacgcaaccaatcacaccacttggtcaaaaagatgtgaatatgtcgattgttgttcaccatcaaccacacttcacaacgcaaaaaccaaacgaagcggttatctggggttacttcctctacccacgtcgtaacggtgaatttgtggataaaccttacatcgaaatgacgggtaaggaaatgcttcaagaattaattggccaactatcaaaagttgatcctggcccaatcaatattcgtgaaaaagaagctgaaattatggacagtgtcatcaataacattcctgtctatatgccatatgcttcagcactctttaataatcgtgccaaaactgaccgtccagaagtcatccccgaacattcaaccaacttagccttcactggtgaattcgttgaacaaccttatcagatgattttcactgaacaaagtgctgttcgttctggcgaaattgcagcttatcacttcgctggcattccaatggccaagttagtcgatacaccacgttatgatcgtgacatcaagacattgatgcgcgcaactaagaaaatgtttgcttaatccaaaaaagcgcggtagatttttacaaatctaccgcgctttttttctttaattaccattatgaaataaattatgagaattagggcttatctaatgcaaaaataatcactatcgtttacaataagtaagtattaaaaatggaatggggtaaagaaatgacaattacatatgtcgtcatcaacatcgtgatcatgctcatcatgttatttgttttaaacaagatggcccggattcacgttaagtttagtcgccgcgttttcacggcattgggggtcgggattttattcggcgcactcttacagattatcttcaaaacagattcaacggttgtcaaacaaacagctgattgggtcggcattgtcggcaacggttatgtctcgttcttaaagatgatcgttatgccgttagtcatggtttcgattattcaagccattacgaacttggaatcatctaaaggcttagggaagatggccggcatggtcattggaatcttagtctttacaaccttaatcgcagccacagttggttcagtgacagcggatgttttcggcttaaatgcgagtgatattcaatcaggccaagtcgaaaaggcccgctcgaaagaattacaaacgaagctaggcgatgtacaggaacaaactgttcctgaaaaaatcgttagcttcattcctgaaaatccattcatggatatgacgggttcacgacctacatcaacattagctgttgtgattttctcagctttcttaggagtggcagcattacaattacggcgtaaaaagccggaacaagcagaaatgtttaataaaatcgttaacgccttgtacacggttatcatgcgcatggtaactttaattttacggatgacaccttatggggtgttagccttaatgacaacgaccgtagcacaaactaatgttaaaggaattctcagtctaggtgagttcgtgattgcctcttacgtggcattaatcatcatgttcttgattcacttcctattaattacgttcacggggttaaatccaatcaactacattaaaaaagtgattccaacgttaatctttgcgttcacgtcacggacgagtgcgggttcaattccaatgaacattgaaacccaaacgaaacgtttaggggttgaagatgggattgctaatttatcggcttcatttggggcttcaatcggtcaaaacggctgtgcgggtgtttatccagcaatgttagctgtgatgattgcaccaactgttgggattaatccttggagcatcggtttcttggttaaattaatcttgattgtggcaatcagttcctttggggttgctggtgtcggtggtggcgcaacatttgccgctttaatcgtactttcttcaatgaacttaccagtcgggttagccggactattaatctcagttgaaccattaatcgatatgggtcggacagccttgaacgttgatggctcaatgactgctggggtcttaacggctcacttattaggtaaattggataagaacaagtttaatgatatgagtttgacggaagattcagacgaaatggcttaatttcaaaaaatggagggtttagtgatgcgaacgattattatcggtgccacagctgccggaacaagtgcagctgcaaaagcaaaaagaacgaatccagatttagacattacgttatacgaaaaacgggactatgtgtcctttggggcttgtggcttaccttattttgttggcgagcactttgaagatcccaaccaaatgattgcccggacacctgaaaaatttgctcaacaaggtattgatattgcgcttgaacacgaagtactatcagttgactttgatgcgcaaacaatcgtggttcgggatttgaaaaccaatcaagatcgcacagaatcttatgatcaattaatgttagcaacgggagccacagctgtgatgccaccgattaaaaatgttgatctcaaaaacgtctatcatctacggacgatggcagatggacaagccttacgtgaattaggacaagacccaaaggttcaatctgtaacggtgattggtgcgggctttatcgggttagaaattgccgaagagttccatcaattagggaagcaagtccgggtcattcaactagaagaccgaattttaccactggcttttgatccagaactaacggacatgttcgcggatgacttacgtgataacggcattgaattacacttatcagaagctgttcaagccttagaaggaactgttcaggtgactggcattgtgactgataaggggcagtatgcgacagacttagtgattgtagcagctgggattcggcctaatacgcaattcatcacggatgatcgattgaagaagttgccaaatggtgcgattattgtcgatcaagcagggcggacatcgattgaaaatgtctatgccgctggcgataatgcaacggtcattaacagcgtgacgaaccaaccgatgtattcagcacttgccactggtgccaataaattaggccgaattgtcggcacgaatttaggcgggcaagccgctcaattaccagggatgttgaattcagccggtgtgaaattaatcacgctagaagcgggccgaacaggtttgactgaaaaagaagcggcagaggctggtattgatttcagtactgttttaatccacgacaagaaccaaacgaattattatccaggccaatcagatttaacgattaaattgatttacaccaaaacagagcatatcttaattggtggccaggtggttggtcaaaaagacgcagtgttgcgcgttgatgtactcgcaactgcgatccaagcgaagatgacaactgaacaactcgggttactcgaccttgtttatgcaccaccgtttgcaagaacgtgggatgcactgaatgtggccggcaatgttgcccattaattaaaaaaaagtgacaccgcacaaaccgtgtagtggcgctttttttgttgcatgcttaaacagttgttcatagtgtttacttgaatgtttactcgggtctgtgctaaaattgcatttagaaattaaatttttgcaaagttagttatgaattaattacgatgattaagaaaacacaaataaaaaatttatcgacaggagacagtttaatgaacaacacaaagagtttgattgcattgagttctggaattttaggggcagctgggatcggtttattgagtgcagggcaagtacaagcagcaacgacagcaaccgtcaactacgcagatggtgcaacaactgtttggacaagtccaacaactggtcaaactgctaaacgatacatctttaagggccaatcagtaaatcttttagcatcacaaaagattggcgctgaaacatggtaccgaattggaaacggcgaatgggtacctgaacgttacttaacaaccagtgacgctacaccagctgaaacaacaccagcaacagaagcacctgctgctcaaaagacagctcggattgcctatgccggtggcgcaacaactgtttggtcaacagcaacttatacagccccaacaggccaatacttaggttatggtcaaaccgtcaacgttgtgaaaacagaaactgtttctggcgaagaatggtatcaacttgaaaatggtagctgggtaccagctcgctttacaggtgatggtaagattgaagccacaccaacgcccgttgcacaaccggtagcaccagcacaacctgcaacagcgactcctgtcgaaacaccagctgcgccagcaccagttgcaacaacaccagcgcaaacagaaagcacgcctacaacaccagcacctgtcgcagaaagtgaatcaacaccagttgaaacgcctgccacactagaaagtacaccagctgtagcagaaagtagtgcgcctgctcaagcagaaagtacaactcaaacacaacaaccagctactcaagaatcatcagctcctgtccaagaaactgcaccagttgaaacaacaccagccccaactcaaaaggcaccagttgaaacaacaccagccccaactcaaaaggcaccagttgtaacgacaccaacaccagccccaacggcacctgcagcaacgactggtaatgcgcaagctgttattaatttagcgatggctcaaattggtaaaccttacgtttggggtgcccatggtccaagtagttttgactgttctggattaatggactatgtcttcagaaatgctgctggtaagagtatcggtggttggacagtccctcaagaaagtgccggttatgctgtttcattaagcaacttgcaacctggcgatttattattctggggttcacaaggtagctcacaccacgttgcgctatacattggtggcggacaatatattcatgccccaaaacctggcgaaaacgttaagatcggttcaatgcaatactatgcaccaagttttgcacgccgtgtcttttaatgattgcaattaagcgaacatctcacctaggtgggatgttttttgtattttagccctaaataagctatgatatgtagagatttaaaaaaggactgacgagatgaagatagaagtacaagcatttatcaatcaaattcaagatcaaacatatttaacggatgaatacgagctccccacgccagatccttttgtggcggacggtattttggcacagttaaaacccgctattgataaagccattgaaaaacaagctttggcctctttttcggtgctgacagaatatgctggcgaacccgttaaggtgacattggaaacggggattgtgaatctaccattacaatacattaaaaaagtaaatcaattttttgaactcgacgaccaagcagaggtgaatctttatttatatgtgacatcgccactcattaatcgctcgaacatgcggattgacttaattgggacggtagcttcgtttgaagaatcggcagctgctaattggacgaagattgccgacttgctaacaaaggacttggaagccgtcgtaatcggttcacaggcgcctaaagaagaaccagtcgaaaagaaggcgcccgctaagaagaaagccgcacctaagaaaatggcaacgactaagaaaaaagcgcctgccaagaagacaacagctaaaaagacagctaccaaaaaagcaacgactaagaaaacaaccaccaaaaaaaagactacgaaaaaagcagactaatttagtctgcttttttgatggcgtctattaaaggcaagtcgccgttaacaaacgagaatttcttgtggattgtttcggtcggatgttctaagacggtgcaaatcatcgcagcgacatcagcacgtgcaacttgtccaccagatggttgcattgtcactaggccggtagcttcgtcgtttgtaagtgtcccaggacgcaagatggtccaatctaaaccagagaattcaagccagtgatcggcatagtattttgcagcgtagtacggtttaatactttcaggccatttagttcgatcctcaacaaagagtgcactgaccatgacgtagcgactaacttcagcaatcttagctgctgccatactcttaacggcgccatcgagatcaaccaacagtgtttgatcatcgcctgttttaccgccagaaccagctgtaaagacaatcgcatcatgatcggcaaatagtggtgctaaagccttaggttgtttggttaaatcgaataagacaggcatggcccctagttgtgcaagttcatccgcctgttgttcgacacgaatgccggctgtaacggtgtgaccggcagcaacgagttggctaattaggagctggccaacgttaccatgggcgccaataacaaaaatccgcatagtaaaacctccaatataaatgtgtgtgctgtccattatagtagttattgaacagtgacgcaaagatagtggatttaaaaacctgtgttgtagtacaataaaattcggcaccttgcgaaaaaatgagtgtgctttagggtatataatcttgaaagtggctgatggcaacctttaaataggcaaagctaattatgggattcgttttataaataaatctaagaatcctctcattttttcacaaagttgcttattagaatatcatgaagccgtgtttgttttgtgttatggtacagatatagagattgtgatttattggataagtagtcctatttgttaatgctatctcagaaagtaggaggagaacatgacaaatcaatatcggagcgtttttgatatcattggaccgattatgattggcccttcaagttcacatactgctggcgcagttgccattggacatgttgctaatcgtctttttcatgcaccgattaacaaagttattgtgcgttactacgaatcttttgcacaaacccaccaagggcacggtaccgattatgcaattattagtggcgtgctaggattcgatccggccgatcaaagggtaccaatggcagttgatttagcgcgacgtcaaggtattgacgttgtcttcattgaagatccagggaatagtccagtgcaccatcccaatacagcggaattaacgttaatcaatcgtgagaaggaactaacgatttggggctgttcaattgggggcgggaccatcgaaatccgccaagtgaatttgaatggcattgtgattaaaacggatggcccgttaccattggtttttgtcgaatcggaacaagaaatcggcgatgctttagaccagatatttgaaggcaactatcgtgataagcgcatatcggttaaagtgccagatcggtttttgtataaaatcgaactgattgataagccgtacccggaacagattgaacaggtccgcggaatgagccaagacgttattgtgttatagaaagtggtgggaagatgtatacaacaattcacgaattagtcgagacagcgcaagaacggcaactaccaatctcggaattgattatcgaacaagaggttgcgatgagtcacactagtcgtgaagtcatttgggcaaccatggggaaaaacttggatgtcatgattgcggccgaagaaaaaggcgtgaccggtgaaggtgttcagtctgccactgggattacaggcggtgaagcggttctgttgaagcggtatcgggaaaagggaaagtcgttatcaggtgatgtgatgttgaccgctatgcaaaatgcggtagctaccaatgaagtcaatgcttcaatgggaatcatttgtgcgacgccaactgctggttcagcaggtactttacctggtgttttgtctgttattactgagcgcttggcgcttgatcgggatgcgcagattcggttcttgttttgtgcgtcagcctttgggatgattgttgccaataaggcgatgattgccggggcaactggaggctgccaagccgaagtggggagtgctgccgcgatgggcgccgccgctgcagttgaagctgctggtggcacaccacaacaatcgtcggaagcattcgcgatggcgatgtctaatctattgggattggtttgtgatcccgttgctggattagttgagataccatgtgttaaacgaaacgtgattggggccgtcgatgccttgaccagtgctgatatggcattggcagggctaatcagcaagattccagctgatgaagtgattggtgccatgaaacgaatcggtgaagatatgccatctacattacgtgaaactggtttaggtggattagctgctacaccaaccggggttgcattgaagatgcaaatctttggtaaggataagagccttaaataaaagcgacttttaggaggaacaattatgcaaaagaaactttcaaaatccgcatacggcggtgtttcaggtgagaaatatgtaccgtatgtcaaccaaggcgacaaaaaggtcggcaacttagcgattctaataatggggagcattttagccattatttttgctgcttcaacagcttattctgggatgaaggccggtttaaccgttgcagccgggattccaggttcaattattgggtctgggttagtcggtgcctttgccaaatcaaaagggattttaggcaagaatattatgcaagggatgtccagtggtggtgaatcaatcgccagtgggatgatttatgttttaccagctattattttaattggtggccacatcaacttcattcaaggggtcatcgttggggtgctcgcaattcttttttcaatggggacagcctcattagtgcacaactacttaatggttgaagaacatggtaagttggtttatccagaagccatggcgatttcagaaaccttagttgcgtcagatactggtggcgattcgcttaaatacatgggcgttggctttggtatcggtggggttattacgatgctaacttcatcagtgtttggtgtcgtcaacaacatgattagctacgttggttcatcattttataaatggaaattggacgttgaagtgaatccattacttgcaggaattggttttatcgttggattagaagtgtcattaacaatgtttgcgggtgcgattttatccaactttgcgattgcaccgttaatcggttatttcacagatatggcgggcaacagtgcgcatgtttggaataacacgagtttagccgtgaatcaaatggccgttaacgatttatcaagttcatacgttaaatacattggtgccggaatgatgctttgtggtggtttaatcggtgcgattaaattaatcccaactatcgtgacatcaatcaagaaaacactagctgctaaaaacgtagcaggcgaagaaaagaatacacttggtatgattgccattgttgttggtggtgttgggatcttcgttattggtattatcattgcgcaaaacttcttaatggggattgttggtgcattactagcagccatcttaagtttactctttgtcattgtttcagcccgggttgctgggacgattggttgttctaacttgcctgtatcagggatgacaattgcgtcattagtgattatgacggtagtcttcgtattatttggttggacggacaataaccatacgcaaatcttattgatgttcgggacattcgttgtgaccgccgttgctgttggtggtggctacatgcaatctcaaaaagtaacatatgtcattggtggttcaaaatctgaaatgatgaaatatttcatgattgccgggattgtcggcgtaatcgtaactgtcggcacaatcagcatcttatcaccacaattcgttacagatagtgcaacaccagcctttgggttaccacaagcgaacttaattgctacattaacatctgggattatgacgggtaaattaccatggatcatgattatcgttggggttatgatggcattagctttctactttttagatttaccaatcatgaccgttgcaattggtttttacttaccaatttcaaccacttcaatcatcttgatcggtgctttgattaaagtctttattgaaaaagcaacgcgtgatgaagcgattaagaataatcgggttcaaagtgggattagtttatcatccggtttaattgctggtggttcaattattggtttaatcgggattattctccacgtaaccggtgtgttaaaagatcgcgtaattactggttttgcgaataccaatgcaatggggattatcttattggttgtcatggttgtttcgattactgtgccacttatgatgattcataaaggaggggcaacagaagatgggacgacagaaagcggagattgatttagaacaactcatctatgaaaaaaatccgcaagttcagtttaagttacaagctggccaggtcaccattattcggccgcagaatcactggattcaacggacattacggcgtttgtatgtgaagattccgctagaaacacagctggaacttgatgattatggtagttttgtctttaggcatgtgaatggaaaacgcagtgtccaccagattggccaagcattggcagggcagtatgatgaagccggtgaatacctgtatgaacgattactcgtgtatttgaatcatctagaacacacagaacatttgatccggcgggtaaccgactaagttttattaatcaattagtgaatcacatttttaataaaaaggagtttttcaaatgacagacagaatcgaattatcagcatgtacttcaatgatggtagggaagaatgcgtcaattgatggctctacgatgatttcgcgaaatgaggatcgcttctatgcaatccatcctaaacggttcttcgtacaaccagcagttcatgatcgacatgagacatatgtttcaaaatataacggcttaaccatgccgttaccgacggacggttatcgttacacatcaacccccaacggcgatttaagtgatggtttaaatgaagaagacgggattaatgaaaaaaatgtcgccctctccgcaactgaaagtgtttatgccaacgaacgggtattagcttatgatccgttggtcaagcaaggtttagctgaagattcaatgtgtacgttggttctgccatacatcgattctgcacgtcaaggggttcaattgatgggggatttgattgctaaatacggttcagctgaaggtaatggcgttcaatacagtgatcaaaatgaagtttggtatcaagaaattgttactgggcatcactgggttgctgttcggattccggatgattgttatgcagttgccgctaaccaaattgccatcgaagatgtcgactttaatgatccagaaaattacatgtggtcagaaggtattcaagaattcgtcagtgaaaatcacttgaatccgagtgaagctgaatggaacttccgtaagatttttgggacggatactgaattagatcgtcactataacacaccacgggtttggtatgcacaacgctatttgaaccctgaaatcaaacaagaacctgaatcgagtgacttgcctttcattcgcaaggctaaccgtaaaataagtgtggaagatgttcaatatgtgttaaaatcacattataacgaaactatttacgatccacttggtaatgggacagaagaacaaaagacgatttatcggtcaatttcactttcacggacgcaaaactcacatatctgtcagattagaaacaatgtgccagatgctgtgcgtggtgttcaatggttaggtttgggggtaccaacattctgtccacacgtaccattctttacgaatgcgatggatacggatgaaagttatcgcgaactaccagcgaagatgcagttgaagaacgcttactggttatatgaagcattagcaatgattgttgaatcacactacggggcctttaagaaagctgatattgactaccaaaaagcattatcagaatgggcaagaactaagattgctacggtggatgctgctgtaaaggcggaagcgaatgccactgatttcttaacccagcaaaatcatgaaattgctgcacattaccatgaagcaacaaccgatttgttagcgcaattggtgacagaaggaacgcaactttctaagttgaccttcgtcatggataagaacctatagccaagtgcgcactttatcatttgtcacactcttccaaggggggagtgtggcttttttaatcgatggaggtgctacagtgattgctttaaaaggaaattcgaaaaaaattattatcgcgatggtatacggttttttggcggcggtgagtgttaatctgttcttgattccggcgaagacgtattcgagtggggtcacggggattgcccaattactaacctcgttagtcagctatatgggcggctcattaagtgttgcgatgttggtctttattttgaatgtgccattattgattctggcatggttcaagattaatcatcagtacgcgatttttagtatcgtcgctgtttttacgagtgtccttttcttgaaggtcattccagtacctgttcacccaattgtcaccgaacgatttgcaggtgccttgttcgggggtgcattgattggtttaggggttggcttgtgttttaaagcgggtttttcaactggtggcacggacgtcattgtgacgttagttgggcgcttaactggcaaacgggttggtgttgtgaataatatcatcaacggaatgatcattcttgcagcgggcatcttctttggttggggtgctgccttatacagtatcgtcgaaatctttgtttcaagcttgttgatggattatatctatattcaacaacaaaaggtgactgtgacgatttttaccaagcgacctgaagaattgaagaagcgaatgcatgactttattcatggtgcgactgaattagatggaactggtctgtataccaaccaagaaacaacagtgatcatgacagttgtttcaaaatacgatctaacggaattaaaacgggtcgttaaggatgccgatccgaatgcctttgttaatattcaatccacaatgaacttgtggggtaaatttgaaaacgtcgaataatagtagctatcctctggaactaaaaaacggtcctttcaacaacgctaagttgtgaaaggaccgttttttttatgtggtttggcggagttgaccgtcttcgatacgccaaacgtgatcgacgagatctaaaacccgttcgtcatgtgttaccatgacagctgcgcgtttttgttcatgaactgcatcgcgaattaagtggacaatttcacgaccacgttgcgcatctaaactggcggttggttcgtctgctaaaatgagtgcaggttgattgataagtgcccgagcaatggcaacccgctgcttttcaccaccagaaagcatagcgggataactatgtaatcgatggcctaatccaagttgtgtcagtaattgttcagcggcggattgatcgcgacgacgggcgattttttgtaaaaaagtcagctgctgagtgaccgttagatagggaattaattctgaactctgaaaaataaaaccaattgattcgcggcggatttgtgtttgacgattacgattgagtgttgcaagttcttgaccggccaaggtaacacgaccggctgtgggttgcaagagcgcgcccataatcgtcaacaaagtacttttaccaacaccgctgggaccaacgatggcgctaaattcacctggctgaatcgtgaaggagacatcttttaaaatgtgattaatttgatcaccatcgggataatctttggtgatgtgttcgagtgttaaaatcggtgctgacatattaatgacctccaatagctgtgatcgggtcaatccgaatcacctgaataagggataatagggcgcttaggatggcgacggctaaaaatagaacgctggtgccgatgatcgttggtgctgtgagcataaacggcatgctggcaggcattgactgggcgatgacactaatgataccgccagccaaaagaatcgccactgccgttaacaagccaatctcagagatgatgtgctggctgagatagcgtgtggttgtgcccaatgcttttaaggccccaaagtcccgtaatttctgtagggtaatgatataaaagaaaattgcgaggacaaacagtgagatgacgtataaaaagccgatcatcaagtacaatgaactttgttctgcagagtagccagggatgttatcaatcaaggtttgtttgctgatcacttggtagtgcttgttaaccgacaagggcggtttgctagcaaacgcgttataggtcgtcttttgcgttggaaaaatggtttgccactggtggtggtttaaataaataacaggcgtatgggcataagccatctgcttgctaaagccgccgattttaaattgctgaccagtggtactgtctttaaaggtgtcgcctaattggtaaccattggcttgtaacttgctgctgaccaccactttttgggtggcttggttggacagcttttgaccttgggtgactttgggtgtcatgaagctcgtagcgtcaactgcaatgtaggcaatatcagtttttgtttgttttttaggccgctcgatggtggcttgggtgacgttgatgggtgtcagtgattggtgtttgagagcttgccaatcagattgggtgagtgccgagcgactcaaccgactttccgaaccggcttgtaaaacaaaatgcgtcgccggcgtatttttaatagccgcgccactatcgtttgctaaaccggcagctagtccggtgatgaagagtactaggaaaacgattaaaaagatgataaaactcagtgcgccaaattttaacttattacggcgtaattcttggattgttagaaacatatgccgacctccgatgacttgttattaaggctactataacgatggttagttgattcaacaataatcaatctaagtgtttctgtgttataatgcacacaagttagtcaattgtgatgtaaatggaggctgaaagatggttaatctgcaagacagacgggttaaacggacacataagttaattcgcacaagttttattgagctcctgctaaaacacccaattaatgagattacaattcagatgattgccgaccgggctgatattaatcggcggacgttttatttgcattatacggatatctacgatcttttaagccagacagaagattttaccttaaatgagttcagccagttgctagaacgttttgagttgccttctgaaccacagattgttggccaaactttctttagatgggtcttgtcatatgtgcaagacaacgagtctatgttacgggtattgtgtcgtaatcccgattcacagttaatgaataaattagttgcgttgaccgtgactcacggcaagcgggtgattccatttcagcagccggaaaacgctgattatattttgaattattgttgttggggtctaatcggtgttttgcacactgcattgtttaaaccagcgtttgacgcccagcaattggcgctcgttgctgaacagttattgaatgcttctttacaagtcagcgaaattaaagcatagaaaaaagcccaccggtaaataaatgtcggtgggcttttttctattttattttgctttagcagcttttaattgcttgaggttaacaacgatcttgttgtttaattccgaaacgttggccttgtcggctgcatcgaaatccgtaatgctaattaaagcggagttttcatatactttttcaacagttcctgtaaatgcaccatctaggtcttcgttcactttgccggttactaaatcaccgatattgagattttctttatccatagccaaaaactccttcagacattattaaaattaccaaataaggtgataataaactatgtcatggtaaatagcaagacttactgctataaattaatcgtttgattgtgaatgaaacgaaattggctatttaattccccatctaaatacgctaaaacgaagaagtgttaccggttacaaatcaaaattgaggggaattcatatggaaccttacttagttttttcagatattgatggaacgttggtccttgaccatcaaatcgtgacacctttgaccaaacgcgtgattcgaacattacaaaaacgcgatgtgattttctatattgccaccggccgaatgtacaatcttggccgggtaatttcgcggcaaattaacgatgatgtccggattgtggcttctaacggtgctgtctttgaaaatggccatcagatgaacaagcattatttaggtaaaaaagcgctcaaagctgcttacgaagcatgtttagcagatcccaatttatctgcgcacttttttaccactgacacagcttactatacccaagaaatccccaagtttgttgcgcgcgatgcggggaatttattgttgaatgccgatattgataatcaaccggtgactgatttagaaatgttgttgaatttaagtgatcagattactaacgggattatcattggtcgcggtcatccagagagtttagcagccgctaaacaacgattaatggatcaagctgtgatgagcttgtcttcttctggtccagacaacatcgagatgattccaaccgggattgataaagccactgcaattcgccagattcaaatgattcatggcattgatgccgatcatacaattgtctttggggatgggcaaaatgatttgggaatgttgcaatcagcgaagtacagtgttgcgatggacaatgccttaccagaggtcaaagcggctgcaaattatgtaacagaaacgaatacgaatgacggggtcgctaaattcttacaacaacattttgaattagcactttctgatacagaagttggtctctaggggcttgacccgctttttatttttcgatatacttatatcacggttgttaatcaaccgtgaaatgctgttttagctcagtaggtagagcatcaccatggtaaggtgggggtcgtcggttcaaatccgataaacagcttaaaaaaagagtgtgactcgaactgggtaggctttgaggattaacagggaaaagggcattatggcgggacttgccataatgccctttttgcagttaaccggagaagactgttcgaggagcacgttaaaaaatgagtgcattcaagcttggtcaacttttgagcattaagtcgagaataaaaggcggacaacatttctaacatgttgtccgtcttttttaggcttttctggttaataaacgttcagttaattgttgtagcgttgtttttgcgggcatgtcgggtagtttcgcaagaccagcgagtgcgcggtttgtgtaatcttgtgcgagtgcttgggctttttcgacacttccagattgacggacgatgccttgaacagcgtgcacatcggcatcagtcatagctgcttgtttttccaagtagggtgctaatgtttggcgattggattgcagtgccatgattaacggaatcgagtagacgccgcgtcgcatgtcatcgagaactggtttgccaaaatcgacatcggtctgagtgtaatctaagatatcgtccagaatttggaaggcgagaccgatatttaagccgattttctcggcttggcgggcaaacttcaagcctttttggctttcgtaagcaccgatgaagcaactgagcgcgaacagttggccggttttaccgttaatttgttgtaggtactgttcgggggttaaatcgagattatatcgggttgtcatctgactgagttcaccgtcaagaatttgatccatcgtttggctgttaaattggatgctcttcaaatcgctcgcataattggctagtaacttgaagcagacaacgaataagtaatcgccagcgtaaacggcgacatctttgccgaaacgggcttgaatcgattcttgatggcgacgtaaattggaattatcaacgatgtcgtcatgaattaatgtcgcagtgtgtagcgtttcaacagcggcggctaatgcgatcatcttctgtcgatcgactgcattaaactgtgaaaataataagcagtaagcagggcggagcaacttgccgccagcactaatcatctttaaaatggcgtcggtgacggcttgatttttggtgtgaatgttgtcttcaatgagcgcaagactttgcgcaagttcggtttcgatttctggatagttctgccacatggcatgtactttcgccataattaactccttgttaaattaaatttcgtgttgggcttttaaaaaagtcagggttttgacatgttcgaataaaaaattcgcggctacgccgaccgcaattccggcgagaataccgagaaaagcaagcactggtagatagaggaggacttgccaactctgggcaatgaaactcgcgacgcagagttgaccgacattaaagagcagaccaccagcagctgagatgccaatcatactcataaagcggcggctaaattgcttgaggagtaccatgccaaagaaacttagcgttgccccagcaatgctatacataaaagtagagagggttccccctagcaaggcggataaaacagttcgcatcaccatcaataaaaagcagtcgctgaccggtagggtaaataacgaaatgatggtaattaaattggctagtcccaacttagcacccggggctacggcaaatggaaatggaatcgcgcgttcgacaaggccaataataatcccttgagcgcacaagagtgcaatatagatgtatttacgcgtttgatcgttagtcatcgctgtactccttttaaatcaggcagaaaccatcccgcccgtgtcggtcccatccttggctttaatttcaatcagtaacttgtgtggtaagcaaacaatggtttggcctggcttagaaattttgccacgcttaacatcaatctgattgaagcaattggcttcagtgacctcaatggcatgatcggttaccttaattttgttgtaatcaccgccggcatcgcgataagtgaagtggctaacaccatggtgggtggttaggttcactttgtagacggttttgccatcgtgtttgacgtaggccgtcaatacctgcgcgtttgaatccgctgcttgcgtcgtttgccattcgtgccaactaaaaacagcaactggggcaaacgatagaataaacaggccgatgactactattatatcaccagggcgaatcattttgatgtaacggttagcgcgaatttgtttaaacataggcgtcagtctttctctctaaaatagcaataaaaggggttatgacaaaagcctgtctgtcataaccccctccttttgatagctgtgaattgcttttataatgtgctttcaaaagcattctattgcgtttagcactattagccaaacaactagctacgctagttattcgtctaattttgctaatccgcatagaataaacgcttttgacgcactcagttttataacgtgctttgaagttaactttctgcgtttagcgctgtgaatcaaatcatcgactatgtcgctaattcgcttccctgtgctaatgcttaaagtcaaaccgtttcaaacgcactcattgatttttgtatagtgcacgttgttggccgtagcgccagtgaccgagatgtttttgtaaatatggaacaacccatttatctaatccgaaggcacggcctgaaccgttcatgcaggcgagggccattggaataatccaaatgttaacccaatagaacatccctgaaaggcagaatgtgataaccattgcaacggttactgcgctcgttaaccaagtgaagagaccagcaattaaagctaagccaattaaaatttcaatgatggtcattgttttttgcatgaagaaggcgacttcttggtttggaatcaagaccttcgtgatgctgtagaaccagtggggcatcttatcgaagacgggcattggatcatgaccgaataagtaagaaaggccgaatgtgactttagcagttgctggttcagcagccccgcctgcagcggcaccgctagcagcacttgttgcatccgccgctttagaagcaccgctggtgacagctggttgaagccagtcaaaaggtaaccggagcttattggtgaaccaagaaccttcaccttgaaccttgtcccagcaatcaacaagccacattgcgcctaagaaaattcgcgcaggaactgtccataaaacattaccataccgtgaaatatgaccgcgcatcaagttgcgatcgttcttcgttctgaagaactcattcattgaatagtggaataaatcgtagccagaataaatctgaacaaaatagagcatgttgactaaatgtttaactaatgtggcaaagaacccactgagatggaagaaattcatcaagttggcaaccgcatagcgagaaccaattgaaaccatgaagccggaatagctccctttgtatgggactgttgctttaccttcttcagttgcgatgatgttctttagggctgttgcagcagatgcttcggcgccttgaacaatttggggttgaccgcggccgtcatcagtttcatcgaagaaagccacatcgccgacaacgtaaatcttgtcatcgtcaacagattgcatgaattcgtttgtcacgattcggccggctttaccggttgttaggccaaattgtgccgcttgtgaggaagctttgacaccagctgtccagattagagtggcagttgggaaagttgaaccatcatttaaatcaacatgcatttcgtgaacacctgtaacaccggtattcttgcgaacatcaattttttgtttagccatgtagcgttctgctttggctgcatcgttgcggtcgagcatgttcatgatggttggtgccatttccatcattgtaaattggatttcttcgggatcaatcttgttatcagctgctagttcatcacgccagtcgcgtaattcgccgatagtttcagttccggtaaagccagaaccaacaaccacgatattcaaaagggcccggcgtttttctgggtcgtgttcaattgccccacgacgaacaacatcgataatatgttgcttcaattcaacagcctgttcccatgaacctaaagtgaaaccatgttcggcaaccccaggtgtgccaaagtcgttaggttcactcccaatccccaatataacttgatcataggcgtagcgtccatgttcagtaatgacggttttgtttgcttgatcgatgcgggttaccgtatcggtcaccaacttaacgtttttgcggcgacagaagagatgttgcaaatcgtgttgaacgtggtcttctggcacgcggttagcagctacttcgtgtaattccgttaaatacgtaaagtaggaatgtttgtcgattaatgtaatttgataatctggattcttcttgtaatatttcgcaagttttttagtcgcatagatcccggcaaaaccggcaccgatgatgacgatgtttttttgagccatgatgagccacccctaaatgaaataaatgcgttttcaatcagtatccattatacagaataaactaaagattgtctatttattcacggataagattaatgggattgatgactattaaggaaaccgttttaaattgtgtaaaaccaaagttaatcgccgtaaaataagtgatttaaaagacttgaactttttacataaaaaagataaactgactttgtgtgaaggttgatacaaattatatgattatttatgaaaagggcgggaaaattatgaaattaagtaaagcattagctagtttatcagttgttgcaatgtcagcaatggtattagcagcttgtggtaatagtaataacgctaaagattcatcttcaaaagaggcaaaatctagttcagtcaaagaatcatcaagcaaaaaagcaaccgctaagaaacaagttgccggcggtgaattaaaagacggcacttacaacttagaagaaaagaactacgaaaataattatcgccttaagatgtcaatgaccgttgccggcggcaaagtgacaaagacaacttacgattacgttgataaagatggcaagtcaaaacaagatgacaagacatacaacgaaaaaatgaagaaagtttcaaaaacaaatcctaaagaatatattcctaagttgaacaaagaatttacagataaaggtgcagatgtttcaagcatcgaagtcgtatcaggcgcaactcatagctcaaattcatttaagaattacgcacaacaattagtgcaagctgctcaagctggcaacactgaaacaatcgaaatcgacaatggtgctaagatgcaagatggcacatataagttagaagaaaagaattatagccatgattatcgaacagtcttcacaatggtggttaaagacggtaaaatcactgaatctaaattcgataacattaataaagatggcaagtcaaaagctgacgatgctgcatacaacaaacaaatgaagaagattgctaagactgatcctaaggaatacatcgctaagttgaattctgaattcgtcaaagcacaagaaccaggcaaagtagatgttgtttctggtgcaacagaatcatcacacagcttcgtcaactatgctgaacaattagtcaatgctgcacaaaaaggaaatacagcaacgattacagttgataacatcgtttacggtgaataaaacgggacttcggcagtcagctgccaatgaattaatgggtaactgtctgctagaaggtacgatgaagctaggacaagtcaatttgtcctagcttttttaatggaaggaagtccgagatgtcttttaaaacgtttttagaatttgtccggattgaggtcaagacggcgagtgtcttgcccttaatcttagggattgtttattgttggtacgttaatggccagctgaatccagtgacgacaattgtttattttgtcgcccagttttcgattgtattatttgtgactggctttaataatgtgatggattactacaaagcagttgatctggattatcgggcacagacgaatatcattgggcgcaaacatttgtcgccaaccaaggcactgcatttaatgctctattttttattgttcagcatggcggctggaatttggttggtttggcaaacgaacattttattactattaatcggtggcgcctgtatttttgtggccgtcttttacacgttcgggccagttccgctatcgcggatgccggttggtgaattattgagtggtgtgacagaatcatttggtgcattttttatcatggtctatgtcaacgtaccaagcgacagcatcatggcgctccattttgattggccgacgtttacccttaaaggtcaattaccaacattgcttagtttatgcctaatcggtgtgattattgcaatccccacttcgaacattatgttggcggataatatctgtgatctagatcaagatcggcgcaatgaacgttatacactgccgcattatttaggaacaacctgggcgttgcggttgtataatacgttgatttggttctcactagtggccgttgttgtggcagtgattacgaaggtcttaccgattgaatcgttactattgttattattgattcctgtcattttgcgcaataatcgccggtttaatacacggcaactgaaggatgtcacctttattaccgcgattcaaaatgcgatggcgatcaatattagcttgattgtcagcttgttattagcgattgtccgcacgacctggtggggataatccaccacattgacagtttggtcaacacatgataaaataaatgggataaacgtcaattagagaggggcttttcatatgggtgttaagaaagtcgccttagcctgtactgtctgtggctcacgtaactactatgttgctgagaacaagaatcggacagaacgtctagagttaaacaaattctgtaaacattgtgggcaatactcacaacacaaagaaacgcgctaattaggaggaaataagatgattaagttttttaagagtgttggtcaggaaatgaaaactgttagttggccagatgccaaacaaacacgtaaagatacatcaacagtcgtcatgacctccgttttattcgccattttctttggcgttgttgattttgcaatcttaaaagtactacaattatttatcttttagaactggcttaattaagtcggatttgctatactgatggcaagcaaaaaacttcgcgtggtcggagtttttttattttggtatttaaaaggagaattcacatggttgaatcaatcgaaaaaagttggtatgtcttacacacatattcaggttacgaaaataaagtgaaggcaaacttggaatcgcgtgcccaatcaatggggatggagaacaatgttttccgcgttgtggtgcctgaagaagaagaacatgaaatcaaaaacggtaaggaaaaagtcgacatgaagaagactttcccaggctatgttttggttgaaatggtgatgtcagacgaagcttggttcgttgtgcggaatacaccaggtgtgacaggcttcgttggttcacacggtgccggcagtaaaccagccccattattagacgatgaaatcacacaaattttgcgtcaacttggcatgagcacccgtcatttggatgttgagttcaaagtcggcgaatctgtgaagattatcgaaggggctttcgctggccttgttggtcaaattacagaagttgacgatgaaaagatgaaattaaaggttaacatcgacatgttcggtcgtgaaacagcaacagaattagactacgaccaagtagacgaactagtttagagtgcgacttcaggcgggatgactgaaggagcacgtttcgaaaaaagagtgcgtttgaaacggattgactctgagcattaacctaatttggcgaattggtgctacaagcgccgatttgacaaatgtagttaagcgcaagagtcagtttcaaaaagcacgtttcaacaattaaagtagggggctaggatttgtcccaagccccaacaagataggcggctgagacgaaagatgatttgtctcagccgctttttttgaacaatcaatagtgtctatttcgaaagaatgatgtgatgacgatgtggtatatcattgatcaaatattaactgcagtgggcttagtcatttttttgttagtcttactggcaggactggatttttacaaactaatccgggtttcggcacattggcggccgtgcgcacgtttatatacaaaacaaccaacgctattcattcatggctatcgggggaatcgctattcattcggtcacttactcggacgcctacaaaaagccggaattgctaagaagagcatggtcatttgggtgggcagaaacggtcgattgcatgtggatggagacgcggcgttgcaggctaataacccaacgattcaagtcttatttgctaataaccgcgccgatgtgcaagatcaagtccgttggttagctgcgattattgaacacttaaaagaagcgtatggcgttacgcaagttaatttagtagggcattcgatgggcgcaattacggtgttgcgttatttgttgacatcagaccatgccgtggtggacaaagtgatattgttggcagcgccagttaatgatccatcaattggtccggatacaccacttgttttttggagcgagttaaccagtcgtggaccagttaaacgaacacgtaattataattatttagccgtgcgggccaagtattttccaactgcgatcagtgtcttaaacattgctggcgagttactaggaactaatcgacacgatggttcggtagcagtcgatagtagttttgcattgcgtagcctattaaaaggacacgtgcgccattaccaggagatgttagttcgtggaccgggtggagcacatagcatgttgcacgaaaatcgtttagttgatcaagccattgatgatttcttgtggcgcgattaatggaatcgccttgctttttcggcaattgcttggtatattattaaggtatgttttcatacactagtgggagaccaaatataatggccatcttaaccacatcacggacttaaggaggtatgtttcgtggctaaaaaagtagcaaacatcgttaaacttcaaattcctgcaggtaaagcaactccagcaccaccagtaggtccagctttaggtcaagctggtatcaacattatgggctttacaaaggactttaacgctcgtacagctgaccaagctggtttattaattccagttgtgatcactgtttatgaagatcgttcattcgactttgtaacaaagacaccaccagcagcagttctcttgaagaaagctgccggtgttcaaaaaggttctggcgaaccaaacactaagaaggttgcaactgtaactaaagctcaagtgcaagaaatcgctgaaactaaaatgcaagacctaaacgctgcagacgttgaagctgctatgcgcatggttgaaggtactgcaagaagcatgggattcactgtcgaaggttaattcatgcttgacactttcagtcggattttcaatgaaagttgaaaaatcaagtgggaggtcaaaaaccgttcaccacaattgcaaggaggaaaaccctaatggctaaaaaaggtaaaaattatttagaagctgcaaagcaagtggatgctactaaagcatacactgttgaagaagcaatcgacttagtaaagaaagttgattttgcaaaattcgatgcatctcttgaagttgcatatcgtttaaacgttgatcctaaacaagctgatcaacaaattcgtggtgctgtcgtactaccaaatggtacaggtaagacacaacgcgttattgttttcgctcaaggcgaacaagcaaaacaagctgaagctgctggtgctgacgtagtcggtgcagaagatttagttgaaaagatccaaggcggctggttagactttgacgttgccgttgctacaccaccaatgatggctcaagtaggtcgtttaggccgtgtcttgggacctaaaggcttaatgcctaaccctaagactggtacagttacaatggacgttactaaagcagttaacgacattaaagctggtcaagtggcataccgtgttgataaagctggtatcgttcacgcaccaatcggtaaggtatcattcgatgctgctaaattagtagaaaactttaaagcgatgcaagacgtgatcatcaaagctcgtcctgcttcagctaaaggtcaatacattacaagtttatcagttagctcaacatttggccctggtgtcaaagttgacgttgctagcttctaagttggtaatgcaaaaagcgctcatccgaaaggatgagcgctttttttgttgctataattaagcattaatgtcgataatttcgaattttgtgacatccactaaacctttatctgtaatccgcaagttcgggatgacgtcgagtggcattgcgccgagcttcataatcggatcgaagtgagcggtgacgtggagtttatcgtgacaaatagcattgaaggccttttgatgttcaattaaagtgtcgatgggttcgttactcattaagccgccgatgacaaatggtaatgttgcgatgacttggccatcccgaatggcaacgccaccgccttggctttctttgagcgcttcgatggcaacgaccatgtcagcatcgttggtaccgactactacgaggttgtggctatcgtggccgatgctggtggcaatcgcaccgttcttgatgccaaagccgttaagcaggccaaccccgacattaccagtgagatgatgtcgttcaactacggccactttagcgatgtcttcgtcaggatgatattggaaatcaccgtctgcagtgtgagcgaccggtaagacgagattttgtgtccgactgatgctttgtaagccgatcacgtgggctttatcgcttgtgaggttgagttttaattggtcagcggtgaatgtatcgaggtgtacggtttgtaacaagtcatcaaaaccagtaactgaatcttcagttgttagtaagtattcgccgctagcagcaactttttgaccatcgatgaaggtttgattcacactgaattgttcgagatcatcaaccaataggaaatcggccttcaaaccaggtgcaatcccgccgcggtcagctaagccggtacattgggcagtgttgatggtggccatttggattgccatgatggggtcgatcccgtttgcgatagcaacgcggatactttcatccaagtggccggtttcacggagggttacggattgtaagtcgtcaccgcagagacaacagaaacgtgcgttttgcggcgtcacgcctttcaaaagggttggcatattcttagagacggtgccgtagcggagataaacatacataccgcgactgatgcgatcgagcatttcatcgacttgggtacattcgtgatcgttacgaataccagcagcggcatatgcgtttaagccttgttcttttaaagcgggtgagtgaccgtcgatgagtttatttgcgttgagtgaaacgagtaattcgtctaaaacgccatcatcagcattgacaacaccgggataattcatgaattcggcaaggccgtaagtgagattgcggtcgtaagaatcttggatttcagcagcggtaatcacagcaccagatgtttcgaggcttggattagcagcaggcacacacgagggcatggtgtacttgatatcaagtgctgtctttttggcagatgcgaccatgtattcaagcccccgcatgccagcgacgttcacgatttcgtgtgggtcggccaagatcgtcgttgtgccatgtggtgttacaagtgatccgaagacagcgggtgagacattggcagattcgatatgaatatgcggatcaatcaaacctggcataacatattggccgcgtgcatcgataacttttggtgcaaggtagtcgtcgctgataccgaggaagcgaccattaccaatcgcgagtgtgccttcgataatacgaccattgtagacatcgacgatttttgcatttttaatgaccatgtcggcagcttgacggccagcagcttgatcaattagttgttttaaagttgttttatccatgagtaatctcctttatttagcaggtaattcgtgcattgtgaagagtaataataggaataagagcgcagcaacatacataatcggatgcacttttttacctttaccagcagcaatcatggtgatggggtaagtgatcagcccgaatgctaaaccgtatgagatattataggttaatgggacgcacagaataatcatgaaggctgcaaaagaagtttcgaattctgaccagtcgatgttggcaattgacttcatcatgaatgaacccacgatgattaagattggggcagtcacttgcgacgtcacaacggccagtaaaggtgagaagaataagcttaagacgaacatgatggcgacgaccacggcggtgaaaccagtccgaccaccagcagcaatcccagttgatgattcgatgtaacaagcagttggggttgaaccgaaaacggaaccggcaatcattgaggttgaatcggcgaaaagggctttgccgacttccttaggcatcttgttgcccttgatgaaaccagcttgttgagcaagtccgattaccgttccagttgtatcgaagaagacgctgaagaaaaagacgagaattacgacggccatttgaacattgaagacgttgtggatgttcatgattgagacaccgaaagtgggtgctaagcttggaattgaagcgatgatgctgtgaggcattgcgattagaccagtcacgactcccatgatggctgtggccgccaaaccgatgaataaagcgccagggactttgcgggctaatagagcaacggtgacgattaaaccgaagacggtcaaccaaacgtgcggatctgaccaactcgtaatggtgacgaatgatttagcactactgacgacgatgcccccttgttttaatccggtaaaggcgatgaataacccaatcccgacggccatggcggcttttaaattagcgggaatcgcgttaatcacgacttcgcggacttttaagaccgtgacaagcatgaaaaggagggaagcgacgaaaacaccggcaagtgctgtttgccaaggaattcccatgcctaaaacgacggaataggcgaagaaagcattgctgccgagtccgggtgcaacggcgattgggtagttggcgatgaaggccatggctaaacagccgaccactccagttaatgcggtggcgacaaagacggcccccttatctaggccggcgtcgcctaatatagttgggttgacgaataaaatgtatgacatcgcaataaaagtggtaattccggcgatgatttcggttttaatggtcgacccacttgccttaattttgaattgacgttcgaaccagttcgttcgtgattctgttgcaatatcaatatttttatccattatgcacctctgaattagtattttaagaaccttggcattattgtacaacaaaacaatcgtgtttttaagaaaaatgtgaaaaatatttattattttgtaaatatcgttcgtgatttggtgatgaaaagggtttattttatcaaaaaagagccattagcgtgaaaaacgctaatgactctctcataattcgcgattaatttagatggttgttaggacgtgattagcaatcgctaattcttcgttggttgggatcatcaagactttgatggctgaatcgggggtactgatttgacgggcacctgagccgttttcgttcaattcaggattgatttgaacacctaaaacagccagcttggcacagatatcagcacgtaaacgggcgtcgttttcaccgatgccggctgtgaaagtgatgacgttcgcaccaccgagttcaacgtggtagctcgcgatgaacttcacagcagaagtgatgaacatgtcgtaggcgagtttagcccgtggattggtagcgcgtgttgattgaatatcgcgcatgtcagcggaaacgcctgaaacgccgagaatccctgatttggcgttcaaaagcgtgatgacgtcatcggcactcttatccaattcgttcattaagaatgggacgatggccgcatctaatgaaccagcacgagtgcccattggaacgccttctaacggtgtgaagcccattgatgtatcgacaggcttaccattttggctggccgtaattgaagaaccgccacccaaatgaagtgtaattaattttaaatcggcaacgggttctttcaaaaagtcagctgttgcttgtaagatatagctgtgactaatgccgtgttcgccatacttgcggatttgatagtcttggctgtattcataaggtaagccataaaaactagtttcatctggcatatcgagatagaattgactatcaaagacagccacttgagggacattagttggtaaaatatgcatcaaggtttcaatgcagtcaacttgcacgggattgtgtaaaggtgcatacttgtcgagttgttttaatgtatctaagttggtgcgatcaataatggttggtttttcgaacgtggtagcaccggcaacgacccggtggccgactgcaatgatgtctgcgggtgaatgaatgatgccattgtcttcaagttgtttcaaaagtcgaagaacaccatcttcataggaaagattagcaatggcgacttgttctttttgaccttggaacttgaaggtgaagctagcttctggtgtgttcatgcgttccatgagcccgcttgccagtaaggttaaatcagattgttggaatagttgccatttcaatgatgaactacccgcgttaacgactaaaatattattcaaaaaactgcacctcttacgattaattttcttgatagtctcaattttaaaccgttttttcagaaaaataaaataagtaaaacgtaatgctaggataactaaaattaagtgccgataatgattgacgctttatggaatccatgctatatttgtagttggttatttatgctaccgaagactcaggtgccaataggcttaatatcctgccgaggaagatacgttgaaatccctctctatgtcttggtggacatggagttttttatttttataaggaactcttgaccacaagttttacaaatctaatggaggtgaatcaattgagcgaaacaatcattgcaaaaaaagcacaaattgttgacacagttgttgaaaaattcaatagtgctgtttctatcgtcgttatggattaccgtggcttaacagtagaacaagtaactgaattacgtaaacaattacgtgaagctggcgtacaaatggaagttgttaaaaacacttacttgcgtcgtgcagcagacaaagctggttacgaaggtttggatgatacattcacaggccctacagcagttgcattttctaacgaagatgttgttgcaccagctaagatcatcgctaactttgctaagagtgctgatgcacttgaaatcaaaggtggtatgattgaaggtaaagtggcaacacttgatgaaatcaatgccttggctacattgccaagtcgcgacggtttattatcaatgttactttctgtattacaagcaccagtccgcaatgtcgcatatgctgttaaagcagttgccgacagcaaagacgaaccagctgcataatttaaaattgtgtagttaaaagtgttatcaaaaaatattacccacaaaatggaggaaacaaaaatggcattagacgtaaatgcaattgttgatcaattaaaagaatcatcaatcttagaattaaacgacttagttaaagcaatcgaagaagaattcggtgtttctgcagcagctccagtagcagcagcaggtgcagctggcgcagacgcagcagctgaaaaagacagctttactgttgaattatcagaaatcggccaagaaaaggttaaagttatcaaagccgttcgtgaaatcacaggcttaggcttgaaagatgctaagggcttagttgataacgctccttcagctcttaaagaagacgttgctaaagacgaagcagaagaaatgaaagctaaattagaagaagttggcgctgtcgttaacttgaaataatttaaatagagcgcccttggcgcttgtttagattttgagcactaacctaaaatcgggcatcgcggcgatctaagccatgatgcccgatttgtagttaagcgcagaaatctagcgccaatggcacgtttcaaaataaagtgcgtcattaacgggttgtttttgagcatttgcctaatcagccggtgatttgactgatgtagcaaagcgcagaaagcagttaatgaaagcacgttttatttctaaaagaaccccactaatgtggggttctttttttacatatttttttgtaaaacataaatggcgagttgcacaaaataacacgatgctaaatatggattccatatcttaagcgacagccattgctgttgagaactaaaaaggcaatcagaggatattgattgtcgggtgaacgggaatcggattgtgctccgggtaagtaataagcgaaaatcataatctaacagccatctaacataattgtcattttactgtgttttgccttgggatagcttataattaaattaattaagttaaggagcggttgatatgcgaaaatggggcaaacacatatatgaaggaattcagcgacacctaacgttgttaaaaggcatcttcatcctttcggtgatggtctttgttatcctagaagtcggccggattttccgggacttgaacggggaacaattgaaagcgagtttaacgacacaaagtccgtggaccttgctagcgatgctggtgattgggtttgtggcggtcttgccaatgctcaattatgatttcgtgattgcggagttgctgccggaggactattcattctggtataaagtcaaatctggttggatcgtcaatacgtttacgaacattgccggattcgggggcttcttaggtgcgagtttacgggccaatttctatggtaaaaaagcgtcacaaaaagaaatcttaattgcgatttcaaaaattgcgctgttcttattagccggcctgtcaatctggtgtctgattagtgtcgttttgatctttggctttggtattggtgggatgtatgccaactactggttatggctagtgggcggttcgttgtatttccctggtctgatgattagtacgcgctttaaaaatgcggcctttttcaaagatctttcgatgcaacgcgttttacgcctaacattagggtctttcttagaatggggttttgcgggcggctttttcttaacgattggttatttcttagagattaagggtgacttattacaagtcttaccacttttcatgattgccaacatcattggtgttatttcgatggtaccagggggcttaggaacgtttgatttgttcatgatctttggtctgagtgcagtcggcgttcaaaatgcggacgccgttgtctggttgtcattttaccgagtcttttattacatcgtgccgtttttagtcggcgttggtttatttactcacgatgcaggcagccggttaaatcattatttacagggcttacctcggcaggtgatgcaaaaaatcgctcatcacttcattgttttcttcctttatatttcaagcatcattctattattagtagcaactgtcccgaactttgcgattaccaacacagtgattggacagctctacccatacacgttcttcttcttagatcgtgtgacaaacatcattgtagcgtttgtcatgttggccttagcccgcggcgttgccaaccgcgttcaaaaagttttctggccgttgatggtgctattggtgattgcgattaccaatacactatggcgggatttctcaatcaaactcgctgtctttttaacttttgtgctcgtagctagtttcttattgaaacgcgaattataccgtgaacggatcgaattttcatggaatgatcggattgtggatggtgtacttttcgtgggcgccttcttgttatacggctttgttgggattgccaattcgccacacttacggcatcgcaaacccgtaccaacagcgcttttatttccatccgaaagagtctggttggctggttttatcgggatgttggttgccgcagggaccttatatctcgtctaccgttatctcagtcgagggggccgttcaatagcagcgccatatgatgaagcacgaattgctaacgtgattaacacttacggcggcaatgaggtcagtcatttggcatacttacgggataaatcagtttatttctatcaggaagaaggagaagatcaggtattcttgctttatcgtaaaaaagcggatcgcttaattgtaatgggtgaaccagtcggaaatccggctaaaattttaccggcaattgaacagatgatgcacgacgctgatttgattgattgtcatttagcgttctacgaaatttcaagtgaattaacgatgcaactgcatgaaatcgggtttgactttatcaagtttggtgaagaaggctacgtccgtttggcggacttcacgatgactggtaagaaacggcgggctgaacgcgccttaatgaataagtttgaacgtgaaggctatcaatttgaaattttaaacccaccatttagtgccgaattaatggcagaactcaaagcggtttctgatgattggttgggtagtcgcgttgaaaaaggcttctcgttaggctttttcgatgaagcatacctccaaaaagccccaattgcagttgtctataatgccgatcaccaattaattgctttcgctaacgaaatgccaacaggaaccaaagaagtcgcaagtattgatctaatgcgtcacagacaagacgcgccatctggtataatggatgagatctttattaatctctttgaacaaaatcgaacggatggctacacgtacttcaacctcggcatggcgcctcttgcaaatgtagggacttccgagtttagctttattgaagaacgaatcgctcatctgatctatgaatacggctatcacttctacggattccagggattacggacctataagaagaaatatacgacggaatggcgttcgaaatatatcgcttatcaaaaacggacctcattaattttcacgatggttcaagttttaatggtcgttaatcaacgggttgcggatcaaccgcatcctggtggcttgctaggtcgtttgatgaagtcagttcaaattgggaaattttcagataactaacgacaaatgaggaaaaaagatgacagagtattactattctaaaaatccagacgttgaacacgctgagcggcaatggacgtttgaattacgcggctttaattttaaatttataacggataacggggtattctctaaaagcactgttgattacggttcacgggcattgctagcagcggtcgatctgagtgaagcgccagctggtccagtgcttgatatggggtgtggatacgggccaatcgggatgacgattgctaagctcgcaccagagcgccgaatcgacatggtcgatgtgaatgaacgggcattggatttggcacgtaagaacagtgaattgaatcagattaccaacgttactgtattcgaatcagctgaatatcaaaacgtaacggatcaatacgccgccatcttcaccaacccaccaatcagagcgggaaaagatgtggtgcaaaatattttgactggtgcctatgatcacttattaccagatggtgaattgaacgttgtgatccaaaagaaacaaggtgccccatcagcgaagaaaacgatgatgagcatttttggcaacgtgcaaattattcacaaggataaggggtattacattctccaaagtattaaattaaagtaaggaccggggttgaaagcggtaaattcaggcgaattgtgctaaactatgattaaagtacaaggaggttgatacgatgaaaaccagatataaaattttaatcggcgtaggggtgactgcagcagttggcgcaacgaccgcttttgtcggttctaaggcagtaatcgataaagtatcgcgctatcgcaaacgattagcagttaaaagttttgtaaaagacaaattacatggtaatcaaaaggcgttagagttggtcgatcaactctccgatgcggatgtgaataacttgttgactgcggcagacaggttaacccaattaaaagataagctcggagaacacgcagacaatctaccagatatgatggatgatttgcgccaaacactaatggcttacgcaacaaaggtgaaagaaaaactatagagtgcgactcgagttggtcaggctttgagcattaacagtgaaatgagcattatggcagtccttgccataatgctcattttgcagttaaacggaagaggatggcttatggagcaattaaaaatggtatcgacaatccgtcggcaccatttttaattgctcgactagcgcgactgtgttttaatagttgagaagtaaaataaaggggcgactaacgcgtgagtgaaacacaacaagagatcgatcaatggatgcaagccgccatcgatgaagctaaccaagcacgcatcattggcgaggtaccgattggcgccgtgattgttaaagacggacaaattattggacgggggcataacattcgcgaacacgcgcaagatgcgacgttacatgctgaaattctcgcgattcaagaagcctgtatggttgaaaagagttggcgtctggaagataccgcgatttatgtcacgttagaaccatgcccaatgtgtgcaggcgcgattatcaatagccggattcccaaagtttattttggcgcgagtgatcctaaggctggtgtgaccggcacgttgatgaatttattaactgacaaacggttcaatcaccaagctgaagtggttggcggggtgcgagaagctgaatgtgcgagtttattgcagactttttttagaaagattcgcgaaaatcgccgtaaaaaaaagaaaatggctggtaattaatgcttgaatcaggtagaataggaattgccgaaaggccttgagacaatgatgagcctacgaatcgtgtcaggttcggaagaaagcagcactaagtttgttttatcatgtgtcttaagttttgtgaaaattaaccagacccaacggacaattaattttgtcggttgggtcttttttcatgcaacgcaatcaaaattgacggtaaaatatgctaaaatggaacaagtagttttaaatgaatcggactttaaattgcaaaggtggaggtcattaaatgagctatcaagctttataccgggtttggcgcccgcagcgtttcgatgacgtgattgggcaagaaacaatgacccaaacattgaaaaatgccattatgacgcaccaaacaagtcatgcttatttatttacaggcccacgtggaacagggaaaacatcggctgccaagatttttgccaaggcaattaactgtcattatcaaaaagatggcgaaccatgtaatgaatgtgagacatgtcgggccattacggctggcgccctcaatgatgtgattgaaattgatgcggcgtctaataatggggtcgaagagattcgtgatattcgggataaggccaaatatgcgccgacccaagctgattataaaatttacatcattgatgaagtccacatgttatccactggtgcgttcaatgcactgttgaagacgttggaagaaccaccaacaaatgtggtattcatcctcgcaacaacggaagttcacaaggtgccagcaaccatcatttcgcggacgcaacgctttaattttaagcggatcacggccgctgatttatttaagcgaatggcttatattttagatcaaaaggaaatgacctatgatccagcagctctgaaagtgattgccaaagctgctgaaggtgggatgcgggatgctttaagtattctcgatcaagtgttatcctttagcgacaatcacgtcacgttggataatgcgttggatgtgacaggcagcttaaccgaagcgttgttggcggattatgtccaaacaattcaggataatgcgcctaaacaagcgttgcaattgttgcaacagattttggctgaaggtaaagatgcccaacgttttgtggaagacttaattgaatatgtgcgcgacttactgttgtatcaacaagcacccgaattagtcgccgcaagtgaaatggatctattggatgaacacttcaaagcgctcagtgcagcgatgccggctgaccgtttgtacggggtgattgatatcctgaatgaaacgcaacagcaattgcgtttcacgaaccatccagaaatctatctggaagtcgcaacggtccgcttgacgcaagtccagacagcccaagtaacgactacgatggttgccgcaccagctgctgataatgaacaagtcgcagcgttgagtcaacaagttgcacaattacaagcggcgttacaaaaattggaagcggcgggaccagtgagtgctccagctgccaagcctgctaagaagattagtaaaaaggtcaaccgtaaggcgatttatccggtattggcagatgcgacgcggaccaatttggagaatctcaaagaagtctggccggatctgttgaatatgttggacgttaccaagcgcgccgtgatgaaggtttccgaaccggttgcagcgagtcaaagtggcgttgtcgtcgcgtttaactacgcgattttattcgagcgagctagcaatgatcaagatcttttgaacattttagaaaacggcttgaatcgtttgactggcaaccccttcaaggtggttttagtgccccacgatgtttggccagaaattcgccaggaatatttacagaatcacgcagtaccaagtcaacaggtaacaactgatgacgaagcagaagcaacgccgaaaccagaacaaaaaccggccgttgtcgaacaagcacaagctttgtttggcgatgcggtggttgttaaaaaagattaacgtttaaatttgaaaggaagtaatgaagatgcgcggaatgggtaatatgcaaggtatgatgaaacaaatgcaaaagatgcaaaaagaaatggggcaaacacaagaagccctcaacaatacagaatttgtcggcaaagcagccaacgatttagtcgtggtcacaatgactggcgacaagaagatgaaagacattgccattaaaccagaggccatcgatccagatgatgttgatatgttacaagacctcattatcatggcaactaacgaagcgatgactgaaatcgataaacaaacacaagcccaaatgggtaaatttactaaaggcctcccattttaagtgagacattaaggaagtgcattgatgcaatatccagaaccaattgcgaagctgatcgaaagctacatgaagttacctgggattgggaacaagaccgcaacccgattagctttttacacgattgatatgaatgaagacgatgtgacgaatttcgccaagaacttaatttcggcacgtcgtgatctgcattattgtagtgtctgtggcaacattacggatgaagacccgtgcgaaatttgtcgcgatacaacgcggagtcaagacatgatcttagtggttgaacaaccgaaagatgtcatgtcgatggaacggatgaatgattatcatgggctctaccatgtcttgcatggggtgttatcaccgattgaaggcaaggggcccgatgatattaacatcgccaatttgattaaacgattgcaaaaaacaccggctaaagaagttatcattgctactaatgcaacacctgaaggggaagcaacggcaatgtatatttcgcggttgattaaaccagctgggattaaagtgacgcgtttggcgcacggtttatcagtcggtagcgatattgaatacgcagatgaaatgacgttgttaaaagcggttgaagggcgtcaagaaatttaagaatggtgggtttgcgatgtttggtagaaaaaaaccgacattaaaacaattaggtgatcaagccttattggatttagtgtaccaagtcaaagataagtggcagatggcccaaaagacgcaagacaacgtccgcggactcgatgaccaattagagatggaaagtaagattcaacaagcaaagtttgaattcttattccgccaagcccgccaacgtaaagtagcaggtgaagcagtttcgaaagaagcagcaactagaaatacatttagatagcgcgggcattcagatgacagccgcagcgtgaagacaaggtcgagtgactttgtctttttttatttcaaacgtctgctgtcgcacgctaaacgcaagaacataaccgccggatacgcactcttccctttacgtcttttgttgaatcaagtaaaatggaagtaactctatggatgaagaaggttgttttgtggtaggaaaattaattacgtttgaagggccggatggtgctggtaagacaagtgcgttgatggctgttgtaccgctacttgaagccaagtgcaaccaagacatcattgttacgcgcgaaccaggtggcaatccgattgccgaaaagattcgcaatgtcattttagatgttgaaaatacggcaatggatgaccgcaccgaagcactgttatacgctgccgctcggcgacaacacattgttgaaaagattgaaccagcgttggctgataacaaaatcgtgatttgtgatcgatttgtggatagttcaatcgcttatcaaggggcaggtcgtggcatcggtgaggaagccgttgcgcaaatgaacttatttgccactaatggattagcgcccgatttaacggtataccttgatgtaccatctgaagtcggtttacaacggattaaacagaatcgacaggatcaatatgatcgattggaccaagagaagttggcttttcaccaaaaagttcggcaatcctacttacaacttgcgcaagataatccagagcggattcaaacgattgatgcgaccgcagacttagacatagttgttgccaaatgtctgcaagtgattgaacaacgatatccagacttattcacagcatagaaaaggggagattgaaatgaaattacttttagcaattgttcaagataaagatagcaacttattaagcagcgaattaatcgatgccaacattcgggcaaccaagttgtcaacgactggtggcttcttaaaatctgggaatacaacgtttatcgtcggaattgaagacgaacgggttcctgaagcgcttaagattattgaaaaaacgtgtcaggcacgcgaacaattcatgacaccgcctgttaatatggatgccacgatggatagctcaatgtcatatccgattgaagtgcaagtcggtggggcaaccgtctttgtgatgccgattgaacagttccaccgcttctaatcgatggccagtttaacaattgaacagattcaacccaaacttgtggcccagtttgcccagattatcgcgcgtggacagatggcgcatggttatctattagctggtgcacagggattggggaagacacaattggcacagtggttggcactgcgtctgttctgtcaacaagtgacaccagatgggcaaccttgtcgggcatgcccggaatgtcagcggattttgacgcataatcatccggatgtcattgaaattaagccggaaggtaagagtattaagattgccgatattcgctatttgaaacaagaagtggctaagagcgggatggaatccagtcaacgcttattcattattgaagctgctgaaacgttaaccgccagcgcggctaatagtttgttgaagttcttggaagaaccggcgcaaaatgtttacgcgattttatgtacgagtaataaaaatcaaatgctccccacgattttatcacggcttcaagtgattgatctggcagcattggcaccacaaatggtgcaacaacagtttgaagcagctggtattttgccacaacaagcgcagttattggtgcatttgacgagtgacttaactgaagcacagaccttattggcggatgattggctattacaagtcagtgcgaagcttgccgcgtgggcacaaaaagttgaacaacgtgatttagaagcatttgtgcagattcagacgcaaattttaccattattagttgatcgccaacagcagaagacctttttaactttggtgggcttatggtatcaagatttattgaattaccgctatgaattaggcgccacaccttgttttggtgcgtacgaaagccagttaaaccaggccagcgccgcgttgactaccacgcagttggtcgctcagacggaatatgctttacaagcacaacgcatttttgaacaaaatattagttgccaaaacgtcttagagagtttaacgttaaagttaattgcatagtaaaacgcataaccagcgtatcgggaggatatcaacggtgagtaaagacttatatgaacagttatcagacattgaacagcaagctaaattgacgtttgaggggctcagtgaaatgaaagcagtccttgccgaagtccttgagaaaaacgctgaattaaagattgaaaacaagcacttgcgggaacatttgcaagaattggaaccatcagccaccccgcaaacgggtaaggaaggggctcaagccctttcgaaatcaaaacaaaacttacagaatctttacgaagaaggcttccatatctgcccgtatttttatgggtcacgacgcgaaaataacgagccttgcgcattttgtaatgatgtcatctacggcgaacgaacaaacgattaaaaaaggcagggcaaaagggatgcttacttttggcctgtctttatgtcattattgatgcatcatgaaaggatagaacatgcaaacacaatcaagttttaaaacgacggaaacgggaactttatttttagtaccaacccccatcgggaacttaggcgatatgacttaccgggcaatcgatacattgaaatcggtcgcactgattgctgctgaagatacacgaaatacgcagaagttattgaaccactttgagattgaaacgaaacaaattagtttccacgaacacaatacgcaacaacggattgaaacgctgattgaaaaattagaagccggtgacgatattgcgcaagttagtgatgcggggatgccatcgattagtgatcccggtcatgagctcgttaaagcttgtattgaagcgggcatttcagtggtgccattacctggagccaatgccgggattacagcgttgattgcttcgggcatcacaccacaaccgtttacgttctacggttttttgcctcgtaaaggcaaggagttaacggaagccgtaacgacgttggcacaaaagcctgaagcacttatcttctatgaagcaccgcatcgtttgaaaaagacgttgcaagctttgctcagtacgtttggcgccgaccgcaaagtcaccttggggcgcgaactcacgaagaagttcgaagaattcattcgtggcgacctagaagaagtgcttgcttgggcgactgaaacagaattacgtggtgaatttgtgatgatagttgctggaaatccagcaccagatgcaacggtcagtgcagttgcaacggaatcgctatcccttcctgaacaagtggaagcccagattcaacaaggagcaagccccaacgtggcgattaagacggtcgctaaggcaaatggcttgaaaaagcaagtcgtttataatgcctaccacgaattaacagaatagaggtcacgccatgccaggaaagcaatattcagaaaactatcaaattccgtatttcgaaacggatatcaagagcgaattaacgcttgcatccttggtgaacattttaattttagcatcagagcatcaactcaatgcgctcaacgtcggtgaagcgacaatgcatgcgctcaatcttggttgggtggtcacgcagtatcaaatgaagattacgcggatgccgaaggtggatgaaaaagttaaaattgtgactgaagctgagagttacaacaagtatttctgttaccggaatttctggttatatgatgaagccggcaacgaatgcgtcttcgtccaaagcatcttcgtgatgatgtcgtatgaaacacggagtatggtgcaagttgtgccggaaatcatggcaccattcgagtcaagtgagattaaaggtagcaaacgattcccacggattaagaagattgatcccgaacaagtgacgaccaaagaatatcgtgtgcgttatttcgatattgatggtaatcaacacgttaataacgtccattattttgaatggatgttggatgcgctcgattatgacttcttgacgacacaccgcgtagcaattgtcaacatccgctacggccacgaaattcaatacggtcaaatgacccaaagcatggtcgaacaactcacagttgatgatataatcacaacacggcataaagtcgccgtggatgacctaagtgcagcagaagcggaaattacgtggaaagagcgctgagtcgaacgggttggctttgaggattaacgggataattgggattatggcgggtcttagccataatcccaattattcagttaaccggaaaaggcagttcgaggaagcacgtttaaacgaaagaaagccccattcacagataaagttgtgatgggctttcttttgttatcttcgaatatttattgaaacgtgctttttgaaacagccccctgcgcttaacccaatttaccaaatcgacgatttcatcgccaattcggcaaatccagttaatgctcagaagctaaccgtttcaaacgcactctatcgaaaacgtgttttcatcaacagcttcctgcgctttgctacacttatcaaatcggcgcttacagcgtcaattcgctaagttaggcaagtgctcagaagctaaccgttgatgacgcactctatgatgttgcgttgctgacaaattcttttaatgctgcgcctgttttgcctgcgctgaggccgacttgtagtttgaggcgtgcttttggtccattgaggccttggcagaaggtgacgcccatttgtttaagctttacaccgccgccttggtaatcgtagacgtcttcggcaatcccgttgaaacagcgagaaacaagtacgatggggatgttgcgatctaatagcgcttgaacagcgggtaaggttgctggtggtaagttaccagccccgagtgcttcgataacgagccctttggtgttgggttggttgatggcgtcgaataaagtcccatccatgccagcgtatgcttttaaaagataaacaggttcgacaagggttttgatgtcgcaaatttcagaacgaattaattcttggaagaaattcgcattgtgtttgctgaccaaaccgatgggaccaaaagttggcgttctaaaggttgcgacgttcgtcgtgtgcgtcttcgtgacataccgtgctgtgtgaatctcatcgttcatcacgactagcacacctttatcatgagcatcgtcagaagcggctgtccaaacggcactaatcaagttgtgtaatccgtctgcgccgatttcattcgacgagcgcatcgcaccagtcacgacgacggggatattgttgggaagtgtcaagtctaagaaataggcggtctcttcgagggtatccgtcccgtgtgtgacaacaacaccatcaatcccgtcttcttcagcttgttgaattcgattcttaaggtttaacatcacagcgggtgtgatgtgtggtgaaggcagattggcgaactcttcactttcaatgattaattgattatcgaacagcttttcaaagccggccattggattttgatctgtgggtgcaaccgcgccatcttcgtccgcagacattgcgattgtgccaccagtatggaggactaaaattttcttcatgtttaatgaacacctttctttaaatccgaattactcatctgtaagtatagcaaattttctgcaagagttgctgaaaaatgaaaatcaattgcttgtaattaaataacgttagtgatacatttaaggggttctaaaaattcggagtaggactgaagcgttaagtgctggtggaacggaatgtggacaccagacgaaaagcagcaatgcttgcgatttcagtaccgcattcgccgcagtattatttgtggcagctccaaaagggagatgctttttatggttaatggtcagatttttggtgttaagctagacactagacgcgttgttttactagctgttttaattgctttacaattggtggttgcacgctttgcaatttcactaacgattttcagaattagttttggattcatcgtcaccgccttaatggggtggtggtttggcccagtttgggcgggacttgccgccgttattggcgacctcatcaatagtttgatgattggggtcccaggtggttatttcccaggcttcacactttcagcgtttctaggggctttcatctatgggtgttacttctaccgacaaaagattacatggtggcgcgtgattgccgccgttgtgacagttgtgctaatcgttaacctcggtttgaattcatggtgggtgtcgattattagtcatacaccatttgggttccactttacggcgcgggccattggggaagctgccacattagtgattcatccgattattctatacatcgtgatgcatttcgaaccgattattagattaaaagatagagtattataaatgagtaggtgttatctatttgaagataacgcctttttttgtggaaaccggctttttatgctagaataacaaggattataagcagaagaaggatgaaataatgaagctattggcaatggatacctcgaatcaagcggtgagtgtggcactccttgaagatcatcaaattttaggcgaaatgactgttaatattcgtcaaacacatagtcagacgttacttccaatgattgatcaactattaaaacaaacaaaaaccaccattgaagatatcgatcgctttgtcgttgcagaaggtccgggttcatacacgggattgcggattgcggtgacaacggctaagtcttttgcttggacgcttaataagtcattggtcgggatttcgagtttagcattgctagcggccaatgtgatggatacgaccgccttgattgtaccgctgtttgatgcacgccgcgacaatgttttcgcggggatttatcagtggcaaaatgggacattgcaaaccgttgtggccgatcaacacgtttcactagaagcactactggcacaattacaattattggcagaacctgtttattttgtggggaatgacgttgcacactttaacgaacagattcaagctgcattaggtagtaacgcgcatttcgtgtccgccaaccataatttaccgcacgccagcgtcttgggtgaattaggcttgatggctgaacctgtcgcggatatccatggcttcggacccgtttatttacgcaagacggaagcagaagttaactgggcaaaaacgcatgatgagcgaggcgctgattcgtatgtggaacaagtttagggaatacctcaaaccccagatttgggtcaagaaagaaatgccttacacaactcggcgcgttgaaattgatgagacgacattttacttagcacgcgcgagtcaaaatgatattacggcattgttggacattgaacggtcggtctatgccggtcagacgccgtgggatcgttggaccttcactagtgagttgagcaagcgcaagacatcgttgtatctggttttatgccaagggactgaagtcgtagcgtttgtcggtgcatggttttcaaccaatgaagctcatattacgaatatcgcggtgcggccaagttatcaaaaacgtggtattggccactttttggtgcacgaaatggttagtttagcccacgattatcccagtcaaaaaattacactagaagtacgcgccagcaacacaagcgctcaagccgtttatcagcgattgggttttacagtggtgcggacgcgtcccaattattacattcaggaaaaagaagatgcattcagtatgtgtcggatattgagtcaataggagtcagtcatgtcggaaaaacgagaattaattttagcatttgaatccagttgtgatgaaacgagtgtggccgtcatcgaagacggtcatgttattttaagcaacatcattgctacccaaattaagagtcatcaacgttttggtggggtggtacccgaagtggccagtcgccatcacgttgaacaaatcacagtttgtacacaagcggctttagaagaggccgggattacttacgctgatttaacggcggtcgcagtcacttatgggcctggattagtcggcgccttattaattggcgtgacagctgccaaagcgattgcttacgcacaccacttaccattgattccagtcaatcatatggcggggcatatttatgcggcgcggtttgttaagcctttagaatacccattgttagctttactggtttcaggtggccatactgaattggtgtacatgccagccgccggcgaattcgaaattatcggtgatacacgggatgacgcagcaggtgaagcctacgataaaattggtcgcgtcctcgggattcaatacccagccggtaaagaaatcgatcggcttgcccacttaggtcaagatacatttaaattcccgcgtgcgatgctcaaggaagataatcttgacttcagctttagtggtttgaagagtgccttcattaacacagtgcaccatgccgatcaaatcggtgagacgctgaaccacgaagacttagccgctagtttccaagcgagtgtggtcgaagtgctcaccactaaaacgatgcacgccgcgcgtcaattaaacgtgcgccaactcgttgtggccggtggggtggctgccaatcaaggtttacgtgaaggtttggcgacagccattaaggcatccggaatggatttagacctcatcatgccaccacttcgattatgcggcgataacggcgccatgatcggggccgcagcgcatatcgaattacaaaaacaacaatttgctgatctaagtttaaatgcagtccctggtttggattttccatacggtgcataaaatacgaattcaaaaagcctgtcgataatttcgacaggcttttttgcttaaatggattgcttagttgattgtaaggtagtatagatgtccgtcggcagtgccactatcaacggactgagctgatccacgccaatcagtgttaaatcgtgcatagcacgtgtgacgagtgtgtagaggagatctacgtctgattgtgcgccgaaggtcttcttagagatgtcgtagccaatcacagcgtcgaactcgagccctttggctaagtataatggaaggattaggatgcctttgggtaaactacgggttgtttcaccgatgagtgtgacgtgttcatcaggtgttaaactagcgtagagttggtgggcaacttgttggttcttggtgaggatcgcaacggtcgcgtgttctgcctggagatggcggatttcttgggtcagtgtagcgagcgcttggtcgtttggcgtctcaatgacgcgcggtaggcgcccgtcacggctgaaggcttggagggctgtttcttttggcaagagtgccttggcgaagttggtgattggggcggtcgcgcggtaactcttggttaagctaatttggttgatttttaagcggggaaaagcagcggtcagttgatcgatgaagtggccggtttggtaggtcgccgtgaagacatcctgtgcgtaatcgccgagcacggttaatttcgcgttgggaaaggcgtggtggatgtagacgaactgagcgatgctgtaatcctgcatttcatcgatgaagaggtactgaatgccgtgattttggccgctgtcagttaataagtcgcgcaggtatagaattggggcggcgtcactgagcccgacgatgtggcgttcattgttatccgcgacttggcgaatcatggcgtcccaaaccttcgtagggatgtcggcagggcaagcaccacttaagaagtgttgatattctgtggattcatctaggaaataatcattgtagattgattcatagagtggggcgaaataactttgaacgatttcacgagcgatgaaagcttgttcatcatcgccagaatcgaattcgcggtcaccgacaatcgtccggtaagcatcatcggttaaggtatcgattttttcagcgacccagtcgagatgaacttcgaggttgatttggcgtttaagccgtttgatgagcgtgtttttagtggcgaggaatttgtcgccgggtaacatatttgcggggagtgcgagataaatctgattcatctggtctttagtaaaaaatgggcggtcttcgaagtatagatcgttgaatgccaacggttgggttgaggcttgtttaacgtaagcttcaattgcgtgcatgaacgctgcgctttctttataccggcgcatggcttgtgtcatttcaggaaaactggcttgatctttttcgaagcggtcgaagaggttctcaacctgtaagcctgagaagcgatgacttaagaactcggccatcgtcacttggcgcatgtttttctcgcctaaactaggcaggacttctgaaatataatggctgaataaacggttgggtgagaagagcaccatttggtcggcttcgagctgactgcggctgtgatagagtaaaaaggcgatgcgttgcaagacagctgaggttttaccactaccggcgaccccttggacaatcagtaagtcagcggttgtatcgcgaatgatatcattttgttctttttgaatcgtggcaacgatgttttgcatgtattcgtcactttgttcaccgaggacggcttgtaagagttcatcgccgacagtttcgttcgtatcaaagacgtgttcgatttgaccgttttgaatcttgaattggcgtttgagtttgaggtcaactttgacagggccatttggcgtctcataagttactggaccgagtgtcccattatagtagatactcgaaacaggggcgcgccagtcgtagattaagaaattgtcttggtcgtcgataaaagtggcggtcccgatgtagagtgattccgtttcaccatcttcggtgatgtcaatccgaccgaagtaaggggagttgacgagatcggtcaggcgttcttgttggctagtcagtaatttttcgttttcgacagcggcggcgaccaattgcttttgttgttggaccgcggcgttggtttccatgcggtcatcgacttcggtaatgttgactttcgtattgtcgccgtaacgttgttcgatgtctttggtttcattgtaggcgttggccaattgttggttaatcactgtgaggcgttggtcgacctgtataactgtgcggtcaacgcgcgcttgttcttgttgttttgtgtcttcgtgtaacatagcagcctccaattgttagttgttatattataagcgtcttggggtaaaaaagcgaccgattgacattcattttaaaatccgttagtatgacagtaattcaacagacaaagtgaaggataagtagcaactgatattttcttgaacaggaagcggcgggactgagaagtcgtcaaggagttggttgtgaattgggccttcaatcgggaattagtgagtaactaattcgggtagcacccttatcgcgtgagtggcacggatgattttcgtgcaatttaggtggtaccacgtagaggcgtcctaattgtttaatcacaattaggacgctttttttgagttgataaatcaaattggagggtattattatgaacaaaaaaattatcttaaccggcgatcgaccaaccggtaaattacacattgggcattacattggttcattacgcaaccgggtagcgatgcaagattcaggcgaatacgaaacatttatcatgattgccgatcaacaagctttaaccgataatgcgcgtgatcctgaaaaaatccggaacagtctcttccaagtggctttggattatttatcagttgggattgatcccgctaaaacaaccgtcttcgtgcaatcacaaattcctgctttgagcgaattaacgatgcattatttgaaccttgtgacggtttcgcgtttacaacgcaatccaaccgttaaagctgaaatccaacaaaagaattttgaacaaagtattccagcgggctttttaatttatccagtcagccaagctgctgatatcacggcgttcaaagcaacgacagttcctgttggtgatgatcaagaaccaatgttggaacaaacccgtgaaatcgtacggacgtttaacaacgtttacggacaagaaattttagttgaaccagaaggggtcttcccaccaaaaggcgaaggacgcctacctggtttagatgggaacgccaagatgagtaagtcattaggcaatgcgatttacctatcagacgatgcccaaacgcttgaaaagaaagtgatgtcaatgtacactgatccattgcatatcaaagtaaccgatcctggtcacattgaaggcaacacagtctttacctatttagatgccttcgatgatgatcgtgaaaaagtggctgaactcaaagcgcaatatcaagctggtggtttgggtgatgtgaagatcaaacgttacttgaacgaagtcttacaagcgaagttcgcacccattcgtgaacgtcgtgctgaatttgaaaagaatccagaagccgtttataagatgttagaagaaggtagcaagaaggccaatgctgttgcagaacaaacccttaaagaagtgcgggatgcaatggggattaattactttaactaatcctattcaaattaaaaaaacagttaaacaagtcgctgaatgacttgtttaactgtttttttatagactaatatagtgggataatagatgctttttgatggtactttaaagttgaatatgagagacttaattcaatttaagacagatgtaaacgctgtttttggtatataatttgagaagttatcaacatggagcaaaggagaattgatatgcatgatttaactaaaggtaatccgttgaaattaattatcttatttaccggcccattattgattgggaatatttttcagcaactctatagtgtcatcgataccttaatcgttgggcggacaattggtgttaatgcgttagcagcagttggctcaacgggtggattgaacatgctgattatcggtttttgtacagggaccacggctgggttgtccatcttgacagcccaacgctatggtgctcaagactatcgcggcgttaagcgcagctttgcgacgagcattctgattagtttggtgataaccatcattttgacagttattagtctattatttgctcgacatattttggtcatgatgaagacgccggccagcatcattgttgatgctcaacggtttattatgattatctttggtgggatttttgcctcgatggcgtttaacttactttcgaatatcattcgcgcacttggggatagtcgaacccccctctttttcttagtaattggggtcattgtgaatattgtgttagattttatttttattttaggctttcatatgggcgttgaaggggccgggtttgcgacggtctctgcacaaataattgcggctgtgttatgcttactatatatttatcgccgcattccggtcctcgttttacggccgaaggattttcgcgtgacgcgcaaagatgtcatggatcatctcaaggttggattaccgatgggctttcaatcgtcaattattgcaattggctcaatcgtgatccaaatcatgttgaatacattgggtgctagcgcggttgctgcttacacagcggctgggaagattgatcaattagcaactcaagttgggaattcatttgggattaccttggcgacatattccgcacaaaattacggtgcacgtgaatttggacgaatcagtaaaggggtccgccagacactaacggtgtcaatcatctttagtttagtgatgggcgcgttgatcattgcctttggacgaccactggttaacctgtttatcgggaacaatcaaccgcacgtgacggatttagcacaaatctacttccgctttaacagtagttgttactttattttggcaatcttatttgccattcgctataccttgcaaggtttggggcagagctttattccaaccttagcggggattgcggagttgttcatgcggatttttgccgggatcttcctcgtgcagcaattcggcttcatgggcgcaagtttagccaacccactcgcttggattggttcatgtttggtgctattgagttcctatttcaagacaatgcaccaactgaagcgtcgtgaagcaggtaagaatagggaggaacaggatgtttaaaaagtatttattggtcggcttatcgttgaccatgttggcgttggatggctgtcaggcgacacaatctagtcaaccaacgcacgagaatgcaccaacaattgcaaataaaaaacaagttaaaaaaacaacggcaatcttggctgagaagacctttaagtcaggcgacaatgcctatttagaagtgaaccataataaatcaacgttggatgtccgtcaatggcaaaccgaacggatcaagtatggtgcgttggatggtttaaatcggacaacgactaatacggctttcttatcgaaagagacgttaggccgttcaaacacacgccatcgtcaaacgtggcaaccaaccggctggcataatcaacccgtgatgattgatggccaacgggtctttcctgaaagtcgcggccatttgattgcatacgcgatttcgtttaatttcaaccgagatggtgtttttcaaaaaggggaactcggcagtagcaataatccgaagaacttagcgacacaaacggtcttcagcaatcaacgtaccatgcagatttttgaagatcaggttcgccaagcactaacgcaaaataaaaaggtgatttaccaagtgacaactgtgttccgtggagatgaattgatgccccgcggttactgggttcaagcaatctcaacagataagaagttgaactttaatgcgtatgtttggaatgtacaacctaagatgcaatttgactatgcaaccggtcgcggccattacgatggatcgatggcggtggtggatcagtatgcaggcaatccttatcagaattaagtagaaccaaaaaaagcgccgtctcaagattaattgagacggcgctttttttgcttaatgcacaattactacttacttagaaactaaccgttttaaacgtactttaaacatgcttcgatagccataaccttccggttcactacacaacaaaaatcatggccggaaaccaccataattcctggtgataggctaatcttcaagtgataaacggctatctcagcactttatggcaggtcattgcctgctgccaagtataggtcgtaccattctcttctggtgagggtgactttgtctgcttcgcagatttgtgctaggcggccggggttcattgtgccgacaacgacttgcatgctggctggaattctgaggagccatgcgctagcaattgcgttgacgttggtgtcatgtgccttggcaactgattggagtgctgcgtttaattctggaaatttcggattatcgatgaagaccccttcaaacatgccgtattgataaggactccatgcttgaatggtcatattcgtgaggcgtgagtattctaataaaccaccatcgtgatgaatgctgcgcgcgtcttgcatattggtatgcacgccggcatcaatcataccagtgtgcatcaaactgaattggagttgattagcaatcaatgcttgcggcactgcttgttggagtaagtcgacttgaccgggattgaagttgctgaccccgaattggcggactttaccactattttgcaattttaagaaggcttcagcgatttcatccggttccatgagtggatcaggtcggtggagcagtaaggtgtcaacatgatcaagttgtaatcggttgaggctggcttcaacaccttcgatgatgtgttcctttgaaaagtcgtacatttttttgccaatgccgactttggtttgaacgagcacttgatcacggtcaatatgactggccttaagggcgttcccgaatttaatttcggaagcaccatcgccgtaaatatcagcgttatcaaagtaattaatcccatgttcataggcggtttcgagcattgtcagggcttcttggtcgctcagttgtgggatgcgcatgacaccccagacaattggcgaagccattaagccgctgccaccaacattgattttttgcactatcaatcactccttttatttgatgcttttaacctaccacaaagtaccattaatgaaaagaaaaggctttcctgaatttcaggtcgtcactggcgacaattttcggtatactaatcacaatagacaggagacagttagatgacagataagaaagcacaggcaccgcggctaaatccacaacttgagacggtacagcttactgcgtttgaaccagatgagacttatgaaggtttgtttttcgaagaactaacgttgaagcaaaccgaagttgagatgttattctttaaaggctgtttatttaaaaattgtcagtttgaacaagtcgactttaataactgtgattttcaagatgtgcaattcgaatactgcgcgttgttaaactgttcgttgacgaatgatcccttccaacgagtcgcgtttaatggttgccagttgattggttccgattttgcagaggctggtctgaatgatgtcacgttcgacacttgccaagcggattacaccggctttaactttgcgcggatgcggcatgtcgactttaaagattgcagtatgcaagaagtctcactcgggcaagttgattggcagtggctaacaatgatcgggaatcgtttgaacggcatggatatgactggcacgaatttgaagaatctcgatatcagtcagaatcaattcgaaaaagcgactttcacgctcgaattattacgtggggcgaccatcagcacagaacagacgctcgtgattatgagcgcgttgcgaattaacgtccgctagcttgccggtttttaaaggcaattatcagacaactgattgttgcgatgagcatcacaagcacagcgaagaaatcttggtgcaacagctggcagaggccgctgatacataaagcgatgaataaaataagtgggattttaaggttggctttcattggtcattcccccgtactttaatctgaaaaggcagcgacaaaatattgtggctgccttttcgtttgatttttaataattaatcttgtatgtcaattcaacaaaatgaccgatttgacggctattgataagttccaatggcatatcggttaagtgcgtgctgaccagtgaaatgccgtcacccaggagaactggcgcaatggtgatgatgagttcatcgactaactgggctttaagcaattcggtaaagatttctgcaccacccacaagccagatattgccgccatcttctttttttaattgacgcatgaactcaggaatattcccagcaacgacatgtgttcgatcttctgtatcatgtaacgttttcgagaagacatagccgtttttatcttggtaaggataggtgccggctaatttaagactttgttcatatgtcttacgccccatcacaacggtatcgacggtgcgttggaaagcttgaattgcagcgtctgattcggatgaatcgagtgcagctaaccaagcagtgctaccatctttttcagcgatgaagccatctagactctgagcaaggtataaaattacttttcgcgaatttggttctgtcatagtcaacacgtcctttaaattaagattacctttattataacagttttaaccgctttcatacattctaaaccgttggtaatttaactggatttggcttatcatgaaaagcaaagctgtttactcaaaggagaccaaaaatgacaactactgaattttccccagaaatccaaagtttaattgaccaggttcaaaagaattatcctcaacccattaagatccgggtcgcagacgcagcgtctgggatgttaaaacatgatcaggcacaacgcgttttaaataacgatggcagcttggcaatcttaattaccgatgcgacagcggccgattatgctttatcacatgaattattacacttactattattatcaatcggttttccacaaatcatgaccgatgtcaccacgcaggatgcgcaactcgatgaacaattggttgcgaccggcacaacgttgtacaatgctgctgtgcatatggtgattcaaaaagaacaagaatcccatggctttgtggatgttgaaactaaacaagcctaccttgaaggtctacgagataatctgaccccggaaaaagacgatcccgaaaatagatgggtgattttccgcgtattaacgctgttagatgccctcgtcttctttgatggtggcaaccaacaactgttaaaacagtggacggctgattatccaattgcgtttgcccaagccgaaattctctatcatgtgttggtacgcaaaacaattgattcaccattcacgttacggcgggctgtgattaacttgtgggttgcgtttgatcgcgtgttatcaaccctaggatttgctgaaacgaacctccaacaactcttgacattgacgccggtattaagtgaacggcaactacgattagaagtgcgccaagtctacgatattttacattccgaaaatttatttgcgaccgcaacgaaccaaaaagcgtatgttggaattggtaagagtgatcaacaaaatgcttttgtcttagggattccagaagacaaggcaacaccggaatatttcaaacgattgtatgatttatcagtgcaagccttcttagatgaaattggaatgccgtattcattaagaaaatgagtgcgttcaagctggtcaacttttgagcattagcacagggaagcgaattagcgacgcagtcgatgatttgattcacagtgctaagcacagaaagttagcttgaaaagcacgttaaagaacagagtgcgttaattcgcggttagcttttgagcacttgcctaatcagacggataagcgccaaaggcgattggccgactgatgtagcaaagcgcagaaagctgcgaattaaaagcacgttaaaaaggagtgatggtgatgacttttaaatcaatgttgcatgcggcacagcatgttgttttcttgacgggtgcgggggtgtcaacggcttctggcattccagattatcgatcgaaaacggggttgtatcgtcagcaagccaatccagaatatttattaagtcacacgaatttaatcaccaatccagccagtttttatgaatttgtcacgcagcagatgtattttcctgaagcaaaccccaatgtcattcaccaagtgatggcgacgattgcgaatcaaaaggggcagattatcacccaaaatgttgatgggttgcacacaaaagcgggcgcgcgggatgtgattgaatttcatggtagtttataccgtgtcagctgccaaaagtgtagccaagcagtgccttatcaggcctatttaaaggatatgcatcatcaagattgtggtgggattttgcggccaaatatcgttttatatgaagaaccgattgatccgacggtgattgaacggtcgattcaggcgattgaagcggcggatttaattgtcgtggtcgggacgtcatttcgtgtttacccatttgcgagtttaattgaatatcgccgtccagatgcccaattagtagcgattaatcaagaggcattacaatttgaaatgccagtcactatgatacaagcggatgcgacaaccgtttttgccgcactagcaactaaggagtgagcccatgttaactgaacactatcaaaaaattgatgcaattgatgcccaattggcggttttatttgaagaacgcatgcaagtcaccaagcaaattgcaacaatcaagcatgaacaaaaaatcggcttgacggacatccaacgcgaaaaagcggtgatggatgcgcgccttgctgcggttaaagatccagcactcgcagattacgtaagggatttataccaaacgttaattttaatttcgaaacaatatcaagtaaaattgatgaaggcgatgaaagaagcagaagaaaaataatgtggaaagagcgaaacggagacggagcgctcttttttgatggaaacgtgccgagtctgccatatctttccggttagctacgtatcgcaaacgatcgacttcgtcgctcattcacgatgcgctgctaatcctcaagatataaccggcagattcagcactctaatttgaaacgtgccgattcgaactgccttttccggttaacctaaaaatggcaatcatggctgaagagcgccataatccccatttttttgttaatcctcaaagccaacccgttcgactcagacactctaaacgtgccgagtctgctatatctttccggttagctatgtatcgcaaacaatcgacttcgtcgctcattcacgatgcgctgctaatcctcaagatataaccggcagattcagcactctgatttgaaacgtgccgattcgaactgccttttccggttaacctaaaaatggcaatcatggctgaagggcgccataatccctattttttgttaatcctcaaagccaacccgtttgactcagacactctaaacgtgcttcctgtcgcagtaatttccgcttaatctaaaaatggtattaatcctaaacccctggattaataccatttttgaattaatgctcaattactaaccgcgacagtcagcactcttttgcttaatatgctaaaatgaaactaatttatgagatgtgaggctattgaactgtgactaaacgacgctataatttagcggtaattcgctatcgcgggactttactattattgaatcggattaagcccccatttgctgggctttggaatggcattggtggtaaaacagaacccgatgaaacgccaatcagtggtatgcaacgggagttatttgaagaaacgggtttacaaaccaaacaatacacactccaaaatgtggggtggattgattggcacatcgatggtgaaccgattgcaccgattgacatttttttagtcgatattttaccaacggtgcaactaccactttatccggtcggaatgcgcgaaggcgtgcttcaattatttgaaccagaatgggcacaagctgctgataatcaaggaattgtggcagacttacaggccattttaccaactgttttaagtggtcagctcaatcggtatgatacggattttcatgcagatcagatgattttctttgaagcaattcccattactgaaccaagagaaggagaggaagcactatgatgacaaaggaccaaacgatgatggtcttgatggttttaaagaagaagttgcaagggattcgtttttttagagtcgtcgaagaactgttctcgttatacattatttttaaattcttaactgcaacgggccaggtacagcttttaggggtggcgttttctgaggggcgcgccattagcttaatgttgctgctgctagtcatcgactttagcctatcgcggattcggttaaattataaacgcatgggacaacaattaattgtcacattgaaggatttaacggaacaagaagctttgttcattcaacaattccaacggttctagaggtgtggatatgataacaattggattaactacttggtcagaacatcagtcattaatgcccagcaaaaagcagttaacgttaaacgactacgcgcaatttctgccagtggtagaggtcgatagtttttattatggcttacgcgcaccaaccgtcagcgcaaactggttgacgcaagtaccagccagttttcagttcattgttaaagcacaccaagcaatgacccgccaagaagactacgccgattttacgagtactgaaaaagaattgtttgtgcggtatcgccaatcaattgaaccgctaattaaggccggccaattacaggcggtcttatttcagtttccgccattttttcaactgaatcaggaaaatagtcagtatttacgacaaattcgcgcgtggttaccggatgtgccaattgctgtcgaattccggcatcaatcctggtacgatgacgcctttaaacaacagatgtacgcctttttgaaacagttaaatatgacgcacgtcatcacagacgaagcacaaacaccgacgaacagtgtgccgtttgaaccggttgtcaccaatccggcgtttgcgatgttgcgcctgcatggtcgtaatatggccggctggcagaatccgggtgcccaatggcggaagcaacgaacattgtatcgctataatcaagatgaattgcaattttttgcggatgctgtacggcagattaaaaatcaagcggaacaagttgccgtgatttttaacaataattctggtggggatgcagcggataatgctttgcaattacaacaattacttgggctagaatttcctgatttagccccgaaagcacctgaacagattgatttattttaatgaaggcttagtgtgagttgtcgtttaaatgactgctcttttgtgctatactttgattacttatatggcattatttaagcaagtcgagaattgttaagattctcgtttttttaattaaggagcgaacctaatggcagagacaaaaccaacattttacgtaacgaccccaatctattatccatctggtaaattaacgattggtaactcatatacaacaatcgccgccgatgtcatcgcgcgttacaaacgcttgatgggctttgatgtcttcttcttgacggggacggacgaacacggcttgaaaatcgaacaaaaagcagctgaaaagcatttagctccacaagaatatgttgatggcatggctaaagacatcaaagcattatggcaaactcttgaaatttcaaatgacaaatttattcggacaacggatgaataccatgtcaaagcggttcaaaaaatcttcgacaagttattagcgcaaggcgatatctatcttggtaaatacgaaggttggtattctgtttctgatgaagaatacttcactgaatcacaattagcagaagtttataaagacgacgatggcaatgtgatcggtgggaaagccccatctggtcatgaagttcaacgggtcgctgaagaaacttacaagtttaagatgagcaagtatgctgatcgcttattggcttattatgaagaacacccagatttcatcgaaccggcatcacggcgtaatgaaatgatcaataacttcatcaaacctggtttggaagacttatcggtttctcgaatctcatttgactggggaattcacgtttcaagtaatccgaagcacgtggtttacgtgtggttagaagcgttatcaaactatatcacagcgcttggatacggttcagacaacgacgaattgtttaataaatactggcctgctgatgtgcatctagttgggaaagaaatcgtacgattccatacgatttattggccaatcttcttgatggctctagacttaccattaccaaaacaaatttttggtcatggttggttgttgatgaaagacggtaaaatgtctaaatcaaaaggcaacgtagtttatcctgaaatgttagtggaacgttatggtctagatgctttacgttactatttaatgcgcgcgattccatttggtaatgatgggacatttacaccggaagacttcgtcagccggattaactacgatcttgccaacgacttaggaaacttgttgaaccggaccattgcgatgattaacaagtacgacaatggcgctgtgccagcttaccaagctgacgtgacaccgtttgatgctgacttacaaaagacagctacagaaacaatcgaacaatataccagcttaatggatcaattgaagttctctgatgccttagataccgtttggcaattaatcagccgggcgaataagtacatcgatgaaacagaaccatgggtcttggcaaaagatgacagccgcaaagcggaactcgatagtgtcttagcccacttggctgagagtttacggattgttgcgctcttattacaacctgtgatgacgcatgcaccacgtgatatgtttgcacaattagggcttgatttcgatcaagttgcgcaacgtgaattggtttatgggacattcccagccaatattcaagtggttgctaaagggaccccaatcttcccacgtttagacttggatgaagaagtcgcatatattaaggatcaaatgggtcaagcgcaaaaagcgggcttagtgaacgaaaaagtgaaggctaagcaacaagcagctgaagccaaagctgaattcgatccaaaagcaacaacattagtcagtgaaaaggacgccatcaagtttgaagatttcgatcaaaccgaaattcgcgttgctgaaattaaggcagttgccaaggttgaaggcgctgataaactattgaaattccgtctagatgctggggatcaaggtgatcgccaaatcgtttccggcattgctgaattctatccagactatgaagcgttagtcggtaagaaagtcttagccgtcacgaacttgaaaccacgtaaattgcgtggcgaattgagccaagggatgttgttatcagcagaacatgacggacaagttgaattagcagttgtgccaaacaacttggtgaacggctcacaaatcggttaatttaaaataacagaaacgtcaaaagggctaaaaggcatttacattctgtaggccttttagcctttttaatggaaaagagtgtgttgccagtggttagcttttgagcatttgtctaacttggcgaattggcgatggaatcgccggtttgaaagtgtaacaaagcgcagaaagctactggcaagagcacgttttaactgtcagaatgaggacactaaaaggagattgaaatgcaaatttttgattcacatacgcatttgaatgataccccatatgcagggcaagaagctgattttatcgcgcaagccgctgaactcggtgttgttgaaatggcgattgttggttcagatacagtattaaatgagggcgctttgcgcttagcagcgcaatatgaacctttatcagccattatcggttggcaccctgaatcagccaaagattatcacaaggcagaagaaaccgtgctgattgaccaattacaacgaccagaagtagtggcgctaggtgaaattggtttggattatcattgggatacttcgccacgcgatgtgcaacaaaccgtttttgcacggcaaatcgagattgctaaatccttgcatatgccaatttcagtgcacacgcgggacgcgttagaagatacgtacaagattctaaaagaaacagatgtccgtgattgtggggggattatccacagttttaatggcgatgttgaatggatgaaacggtttatggatcttggcatgcagatttcgttcagcggtgtggtcagttttaaaaatgcgcatgaagtccatgaagcagctaaagcatgtccattggacgtgatgttggttgaaacggacgcaccttatttaacgccgacgccttatcgtggtaagcagaatcaaccaggctacacacggtatgtggtagaagcgattgctaaactcagagatgtggcaccagaagaaattgcggcagcgacgtatgcgaatgcccaccggatttttaagttaggagcactatgaaaaaaacaattcaagaagtgattgttgttgaagggcgcgacgatacgaagcggttacgggaagttttcccagatgtttcgacaatcgaaacgcgcggttcagcaatcaatgaagaaattatcgaaaaaattgcgctcgctcaagaaaaacgcggggtcattgtctttaccgatcccgattttcatggcgagaagattcgtaaaatcatctctcaaaatgtaccgggcgtcgaacacgcctttttaccacggacagaagcacgtccggaaaaagcaggcggcagtttaggcattgaacacgcaaaaccagcggcgattgtccaagcacttgagcatctattaacacaagatgaagaagcagacgaacaaatcagtcaatcggatttattaacggcgggcttgattgcgggggctgattcaaagcgacggcgcgaattactcggcgaaattttgcacattggttacaccaacagcaaacaactttacaagcgtctcaagatgttccaagtgacgcaagctgaatttggcgctgcactattacaaattaaacaggaattaggagattaatatggaagatattgcaaatcccgagcgtacccggaaaattctcaaacgttacggctttaagtttaaaaagagcttaggccaaaacttcttaaccaacatcgccattttgaaacaaattgttgaagctggtgatatcaccaaagatgacgatgtgattgaaatcggccccgggatcggttctttaacggaacaaattgccagaaaagcgcatcaagtattaagttttgaaattgatgaacggttaatgccggtcttaaaagatactttgaatcactaccataacgtcacgattttaaaccaagatattcttgaagcggatttaaaaacgattatcgccgaacaatttgatggtaagcataatctcaaaatcgttgcgaacttaccctactacatcacaacgccgattatgttgcacttactagaagcaggcttgccaattgatcgcatggtcttaatgatgcaaaaggaagtggcagaacgaatcaacgctgaaccaggttcaaaggcttacggctcattaagtatcgccgttcaacttcattcagaagtgaacttagcctttattgtgcccaagacagcctttatgccacaaccgaatgttgattcagcgattgttgaattagtggggcgcaaagcaccacttgtaacggttgataatcaaaccttatttgatcaattggttcgtggcgcatttgcacaacgccgaaagacattatggaataacttgcaaaatcaatttggtaaacaagatgaagtcaaagcagctttaacaacagccttagaagcagtcgagattgcaccgagcgctcgtgctgaacaattgagtatccaacaatttgcccaattaagcgatgcgctgaataatcagccaatttttgctaaaaaagctaagtaagtaattgccaaatcgttggtacaatggtataattgcaaatttttcgtttatatggtatactatccctcgaagaggtgaagcataatgccaaccacacttgccaatattaagaacggtctcgatgggcatatcggagacaagttaatggttgtcgctcaagctgggcgcaaaaaagttacaaagcgaaagggaattcttaaagaaacctttccagcagtatttgtagtcgatttagatcaggatgaaaatgcttttgaacgtgtttcatacagctatgctgatttgttaacgaaatcgattgagattgagtttgatgaagaaccaattgtcctatagtttaaaatagaagaatagagtagcactcaaccaacgggttgagtgcttttttttgttcaaaaggcagattgacgaatcgccatatacttcacgtggttgattagatgttgacattcgttcgataaaacaatatcatatagaatgtttatgacgtatacaaaagggagaaagaatatgtttggcaattggagagagaataaagtgaagttaggtgggttcattattatgatctgcttaattccgattttactattactaatcacatttaattttattaagtacgaacagaccactaatattaaacatatgaaagtcgcggttgtgaatcaagatcaatccgcaacatttaaagggaagaaggtggcagttgggcaacaggtactaaaaacgttgcgcaatgatcaccgggtcgattggcaatttgtcagtgctaaggatgcaaaagcgaacttagctagcggtcgatacgcgatgcaggttgtcttaccgaaagacttttctaaaaatgcgacaaccgcgttagataagtcacctaaagtcagcttgttaaaagttgaaacgtctaagaaaaataactacatggccggcatgattacaacccaagtcgtgaaccaaatgaagggcagtgtcgttcaaaaaattcaagaagcttataatcaagccttgcttggtgcaatcggcacgctaggcagtggcgtacaagaagctagcaatggcgttaaaaagttaaacacagcagccggtcaattatcaaatgggagccaacaaatctatgataatttaaatgtgttgcatagtgggacacaacaattggcagatggtagtgcgccattggcaagtggcgtgcaacaattaacaactggtgctgggcaactttcggctgggcttggagattatacagctggcgccggtcaaattaatgccggtttaaaccaactagcagccaataaccaaacaattttagctggtggccaacaaatcagtggcggtgtcgaccaattagctgatggcactaagcagttgagtgcaaaactaactgaagcagccgatggaattgaatccagtttagatggtaatcaagaccaattaacacaattgaaagctggtttaggcgctttaaatgctggtattcaagagttagatcaaaaagttaaccattccaataatgataattccgaaattatcaaagcagacttattaaagattgcggataatacaaaaaatacaggggcacttttacaggatagtggtgcgaatttaagtcagattaacgataaagtgtacaatactgctaaacctgatagtgttgcaaacagtttacaagatgcaggaaatcaactaaaagccttacaagatttagcggtaactaacggtaagtttgcaaagtttttaattcagaatccaactattttgaaagcgttgctggatattggagatgcagcaaaagcagacttgctgaatgctggcagtcagttagagtcttctggcacgaacatgaaggctattcaagccaacttaggcacgatgggcagcaacatgagtgatactggtgttcaactacaggctgtttcagatgaattaacaaaaacggctgataacatggcacaactaaaagccggaatcgcgaagatggcaagccaagaccaagcgccgttagcactaaatggtgctactcaggcgattgatacactgacagcggggttagccaaagtcgacactgggttgaaacaaaaaggaaatacgaccgatacaatgggcggaattcaagctgctgacatgattcatgccggcttggttcagattcaagatggtctaaaagggaaagctggtcaacttggtttaatgtcaggcttaacgacttatctgaatggtgtttcgactgcagctgcggggagcaatcaattagtcgcgaataacaacaagcttaatgccggcggacaacagctaacaaatggtctacaagaattaaaccaaaaagcaccaacgcttgtttctggcattacacaaattaacgagggttcaggcttattggcagatggtgctggacaattaacgactggcttaggccaagcgggtgctgggattagcttattaaacgtcaagttaatcgatggtagcaagcaagttgccaatctttcaacaggttccgcaaatgtagaacatttcgtgcaaccagtcaaagatcaattactatcagatacaaatcatggcgcattaattaataccttctcgccattagtcttaacacttgtcttctttgttggagcaatgttgacgcaattaacactttatcgctatggtgaaacattggcacatagcggtcttaagcaacggatgttggttgtagctggcgtagttgtcgcacaagccttattaattgatatctttgcaaacctttttggattgacgattgcacaaccgttcgcgttcttcgtcttaagcatgatgacgagtgcggtctttacccttgcatgtttagcattggataaactctttggaacgatgggaattttaatggccttcgggttattgttcttacaactcatcattacagggggactcttcccgaatgacatgctttcaggcttctatcgtggtgtggcaatcttcttgccagggacttacacgattagtgggttcgaacaagttgtcaacggcaatggttcacaactttggttagtcttaatcgtcttggtgatcttttgtgcagtgttcttcgccggtttgttcggcggagagttaaaacaaaagttaacgcaaacaccaaatagtcaagcttaaagatttgtggtacagttaagaaataaataaaaaggtgggaaatattgtgaaagatagtcaattgttggatgaatacgttgaactttacatgtcggcgattaaatatgtcgaagacttggtttctgaaccaacgcaagcttaccaattgtcttttgaacaatatctgattatgaaagagattgctgatgataattcagtgagtctaattgatattgctaaaaaacgaggcgtaacacgcggtgcaatttctcgacagattcgtgttttacttaaattagactatattacacaagaaattgatcccgatgatcggcgccggttgattttaaatttaacgccgtctggtcaaaaaacagttgaagaattaaatccgaagatccataatcggtttgcctcgtggatggagacgtttggtaaggaaaatgccaagcagatgcttgatttaatgaatgaatttagacataagattatggtaaaagataatcaataatatcgactgaagagcactgacagatgattgtcagtgcttttttggatgcattgttaaaaggttggtttttacaagcagatatgagtataatgaaacaattaaatgctaggtaaaaggtgaatgtgatgcaacgaattgaaaaagcacctgctaaaatcaatctcagtttagatgcactctttctacatgacgatggggaacccgagtggcagatggtgatgacgtcgattgatttggcagactatgttcagataacattacgcgatgatcccgcaattgaggtccgcacatcaagtggctttttgccagaagatcagcgtaacctggcctacaaagcagctcaattattacaacacacctatcagattccaaccggtgctttaattgaaattgataagcatattccagttgcggctggcttaggcggcggaagttctgatgcagccgctgttttacgggggttaaacgaactatggcaacttggtttaacgcgcgaacaattggcgcgattagggctacaaattgattcagatgtgccatattgcgtatatggagaaaccgcccttgtcactggcaaaggcgatcagatcaaaccactcggatcattaccgaatttttgggtcgttgtcgtgaaaccggaagtcagtgtttcgacgccgcggattattcgtgcattggattgcgaccagattcaacagcatccacaaactgaggcgctggttgcagccgttgaagctggagatttaaatgcaatgactcgcaatatggggaatgtcttagcaccgattacgactgaacgttatccagttatcaagcaattaagtgagcggttattgcagtttggtgcggatgttgctcagatgagtggtagtggtccaacggtatttggtatctgtagtcagtattcacgggctcaacggatttataatagtatgtccggattttgcgctgaggtatatctggttaaaccattgaaaccataataaaacgccgacaatcaaatggttgaggcgtttttaattggcgtaggaatcgctttaatgggataaaagcgaacaattaagctctttttttaaaaaagactaggatttaaccgaagatttctatataattgattggtagacagtttttttcggaaataacagtaaagtaatatatagaggggtattcaacatgaaagttagaagaagcgatcgattaatcgatatgacacgctatttattagaaagaccacatacgttgattccattggcattcttttcaaaccgttacgaatcagctaagtcatcaatcagtgaagatttatcaattgtgaagcggaccttttttaatcgtggcacagggatcttagaaacggttccgggcgctgctggtggtgtgcgctacatgccaatgattaaacaagatgaagcagaagcttttatcgctgagatggcacaacggctttcagaaaatgatcgcttattacctggtggttacgtctatttatcagacttacttggacgtccagaagtattacggcaagttgggcgtttaatcgccaaccaatatgtgggtaaagaagtgacggctgttatgaccgttgcaacaaagggaattccaatcgcacagagcgttgcgatgtacttaaatgtgccatttgtaattgtgcgccgtgattcaaaaattactgaaggttcaacggtcagtgtgaactatgtttctggttcatcagctcgcatcgaaaagatggaactttcaaagcgcagcttacctgaaaattccaaagtcttaattgtcgatgatttcatgaaaggcggcggcaccgtcaatgggatgaagagcttgattgaagagtttgattctgaaatggttggcatttctgtctttgctgaatcagatttcgaaggcaatcggatggttgatgattacacatcaatcttgaaggttgataaagttgatattgaaaataaaacgttaagtgtcagttatggtaattacttaacaaagaatgcagatcgcttagcttaaacgatttgatagcacccggacaggttaattgtgcgggtgctttttttatttgaagtgctttcggacagtttccaagctttgtccgttgcataaatgacagcggtaacatagactgaagttatatttaagaggaggttactatgaaaaaaataatgaatgatccaagccaaattgtaacggagatggtccaaggtttagtgcggagttatccagaccaactcaaacaaattccaggaacagaagcagtgatgaaaatcgccgatttaaaacatcggccacaagtcgggattgtcagtgggggcggtagtggtcatgaaccaacgcacgctggttttgtcggcgatggcatgttgacggccgctgtgtgcggacaagtctttacatcaccaacacctgatcaaatttatgaagcaattaaagcagctgacgcgggccgtggtgtgttcttagtcattaagaattattcaggcgatgtgatgaattttgaaatggcgaaggatatggcggctatggatgatattgacgttcgctcaatcgttgttgatgacgacattgctgttgaaaatagtacgtatacgcaaggacgccgtggtgttgcggggacaatcttcgtccacaagattctgggtgcttatgcccgtcaaggtgctggtatcgaagcaattgaagaattagcgcaccaaattacaccgaatattaagacaatcggggtcgccttatctggcgcaaccgttcctgaggtcggaaaaccggggtttgaattagcgcctgatgagattgaatatggtgtagggattcacggtgaaccaggttatcgccgtgaaaaattacaagattcgaaacacctagcaactgaattagtcggcaagttaaaagaagcccaccacatgacggccggcgaacattttgcggtaatggtaaatggcttaggtgcaacaccactgatggaacaatacgtctttatgaatgatgtcttggacctcttggccgctgaaaatgttgaagtcgacttcacaaaagtcggcaattatatgacctctttagatatggccggtgtgtcattaacaattatgaaattaattgaacctggttgggttgctaaattagatgaaccagtcacaacgattggttggtaaaggagagataccatgttaacagttgaaaatacattgaaatggcttgaattgtttgatgcaaaaattcaagctgaaaaagattatctaagtgaacttgatacaccgattggtgatggtgatcacggtaataacatgtcgcggggcttgttagctgtgcatgacgcattgaccaagcaacagccaaccgatgtacaaggtattttgaaaacgactgcgatgatgctcatcagcaaagttggtggggcttctggtccactctatgggacagcctttttagaaatggcaaaactaagcagtacgacacttgaagtcggcccattattggcagccggtttagaaggaattcaaaaacgcgggcatgcacaagttggtgaaaagacgttgatcgacgtttgggctcccgttgtcaaagcggttgaagatggtactttagatgtggctgcaattgaagctgccgtcgaatcaaccaaagatatgcaagcaaccaaaggtcgggcatcttatgtcggtgaacgctcaatcggacatgttgatccaggggcggcttctagtggatacttatttactacaatgttaatggcgggggtattatcatgagtgaatatggtgttgtgattgtttctcacgtaccagaaattgcggccggtgtggcgcgtttaattaaagaagttgccgctgatgtttcagtaacgactgctggtggcacggacgaaggtggtattgggactagcgcaatgaagattcaaagcgcttttgaagccaatgcagggcaagaattgttagccttctacgacttagggagcgctaagatgaacctcgaattggcccaagaactaacggataaaacggtgcatctatacgatgttgctttaatcgaaggttgctatacggcagcggcattgttgcaagcagggacggatttagctgcaattgaagcccaattagcaccgttgaagattaaataagaagtaaaaactgcttaaaatgatgtctgttttggagactgagtttaagcagttttttatatagaataatattcaaaagaaaagatgatttttaataatgtaactagtaataactttaaaatattgttgaggacggtaatgtgattttaaaatacggtaagctatgtattaaatagatattgctgttatatttaaataaattaagaatgaatactatgattaacatattattaggaagattcaggttgaaaaatattattgttactggtggggccggctttatcggttctaacttcgtgcattatgtggtgaataaccatccagaagttcacgtgacggttttagataaattaacttacgctggcaatcgcgctaacttagccggtttaccagcagaccgtgtggaattagttgttggcgatatctgtgacgctgaattagtcgataagttagttcaaaagacagacgcagtggtacactatgctgccgaaagtcacaacgataactctttgaaagatccttcactctttattcaaacgaacattatcggctcatatacgttgattgaagcatgtcgcaagtataatgtgcgttatcaccacgtttcaaccgatgaagtatacggtgatttaccattacgtgaagacttacctggtcatggcgaaggcgttggtgaaaaattcactcctgaaacccgttataacccaagtagcccttattcatcatcaaaggcgagctcagacttgttagtccgggcatgggtgcgttcattcggcctacaagcaaccatttcaaactgttcaaacaaattatggcccttaccaacacattgaaaaattcattcctcgtcaaattaccaatattttaagtgggattcgaccaaaactttacggttcaggacaaaacgtgcgtgactggattcatacgaatgatcactcaagcgccgtttgggcaattttaaccaaaggcaaaatcggtgaaacctacttaatcggtgccgacggcgaacaaaataacaaagatgttttggaattaatcttagaattaatggggcaacccaaagatgcttacgatcaagttaaagaccgtccaggtcatgacttacggtatgccatcgattcaacgaaattacgggaagaattaggctggcaaccagaattcactgattttaaatcaggcttacaacataccatcgactggtatcgtgacaatgaagactggtggcaagcagaaaaagcagctgtggaagccaactacgctaagaatggtcaataaatatgaaattaaattttgatgggattatcttataattaccgttgttcatataagtgtcctgtccgtaataataaaccgttaattgtatcagttaatgtcatttttagggcagtgattacttttgaaactgattggggatgacgactgcggagccattcagcggtgtaagcaactaatgcgttggaaagaaaactaagtaaaaaggcttggtagtcggtggataacgtaatgtgatgggcgctagcaagatcttgaataatccgattaatcagttgatggacgtgatgaataaaatggcgttcgaaggcgttttgcccttcaatcgacaaagcattttgatagaaggcgcggttagcatcgaagtagttaaatagttgcgccaacacctgtgtccaatggatatagctgagatgctcgtcgatgtagacaccgatttcttgatcgtaaatccaatctaataacgcatatttatcagggaaatagtcataaaaggtttggcgtcgaatgccagttttattcatgatggtggtgacgctagttttattaaaaggttgttcaaccattaattgtttaaaagccgtggcaatcgtttgttgggttgtctgagtcatcagggcatctccttttgaacgttattaagtaaaaagtcgtcattcaagctagtgaatgacgacttttgtattatatggaattgcggtatagaaccattgggcatcagctactgataaacggatacagccgtgtgaattagcttttttgcctaattgctctgcttcttctggaatgaaattgccagcttcatctgtgggcacactgtgaaaaagataaataccatgatctaggaaagagcgccaatatttggcaccttccccggaatttgcattgaaaaatgagtcgccgtgttcagcttcgatatagaaggtaccagttggtgtgggtgactcaggggaaccggtcgaagcatgcattgtgtacaaaagatcattgccatttttaaggtagacacgttgctgtgcaattgaaacgtcgacccataaatcgggttgttcgtctaaattaggatatggtttgttttcggaaggcgcacgccagtcaattggtgtcgggtgagccgctttttttgattttatcgattgttgcctcgcatgcgattgtgatttggtagaggacgtgactgcggcttggtgtgtttgatgccgagctgaggtagaccaatacccaccaactagtaaggcaatggcaacaatgatgctgccgagcattaatcgaatgttgtttgtcagttttggcatggccgacttccttccgcaataaagtacctccagtatacgggataaagcgctaaacttcaatacggattagcttgctctagcctagtatttaagctaaaatagaccagtaatcacgaatgacgaggagcttatgatggttaataaaaatgcaattattttagcagcgggtaaaggtactcgcatgaagtcaaaattatataaagtattacatgaggtttgtggtcgaccaatggtagatcatgttttaacccaagttgaaagaacgcacccaaccaatgtggtcacaattgttgggcacggcgctgaaaaggtgaaagattatctcggcgaccggtcacaatatgcattacaagctgaacaattagggactggccatgcggttttacaagctgaagctttactgaaagatgaagatggcattacgattgtggtcagtggcgatacgccacttttaaccgctgaaacctttgaaaaattatttgcataccatcatgataaaggcgcaaaggcaacgattttaacagcaacggccccagacccaacaggttacggccggattatccggaatgatatcgggattgtcgaaaaaatcgttgaacaaaaagatactaatgataaagaagcgactgttaatgaaattaatacgggcgtttattgctttgacaacaagaccttattccaagctttgcatgaagtgacgaataagaacgcacaaggtgaatactacttaacggatgtggttgaaatcttgaagaaaaaaggtgaaattgtcgctgcttacagaatgccaaactttgaagaatcaatgggtgttaatgatcgagttgctcttgctgcagcaacaaaagtgatgcgtaaacgcatcaatacagaacacatgcgtaatggtgtgacattaattgatccagaaaatacttatatcgaagtgggcgttcagattggtaatgatacaattgttgaacctaacgtcgtcttaaaagggaacacaacaattggttcagattgtttcgttggtgctggctcaactattattgattcaacaattgaagacaacattcaaatcacaagttcaacgattgaatcagctatcatgcacacggggtcaaacattgggcctaacagtcatttacgcccaaacgctgaaattggtgaagacgtccatgttgggaacttctgtgaagtgaagaatgctaaaattggcgatcgcacgaagattggccatttaagttatgttggcgatgccacattaggcactgatattaatgttggctgtggcgtagtctttgttaactatgatggcgtggctaaacaccacgcaaatgttggcagccatgtcttcatcggtagcaactcaaacattgtcgcaccggttgaaattgcagatcacaccttcattgcagctggctcaaccatcacggatgatgtcccagaaaaggcaatggccatcgcccgtgcccgtcaaacaaacaaagaaaactactgggcaaaactaccagtagcaaatgacgaagaatggcaatagagtgctggctgtggcggttagtaattgagcattaatacgatgttagattaagcggaaattacggtgacaagaagcacgttttggattaaagtgtgtttgtgacgattagcttagtgttgtaaagcacatcttaaaataaaaatcgtccgtaatcttatttttgagattacggacgatttttttgatacttgtagttattttaaagttgagaaataatcgcgtattaagaaggcgattagaaaagcgggccaaatccaaattgaaccacttgaaaataagattagaagaagtatgataagactcccaacagcggtggttgcccagcccatttttgtaatgcgataatttttaggattatagttcgggtgactggggtagaaaaaatgatactgataaatcaaaacggcaacgaatagaataagaccaagaataaaatagggcatgctgaggtgaaataagcgatcggaagtaataataattaccagaattaaaagatagagattattaaaaatagtgtatttaaggcgggtcatagtaacctcctttttcaattagtgtaccttgtcttgcgctaaatgacaatttaatccataatccaaaataaacaagcatttttggggatataatgggatactaaacgggaggttcgatggtaatcgctattaactttttctttttctctcacgtttctaatgaacagcgcttactttacaacatttgtgaactttttaagttttaatcttgatttccggggtgaaaatgcctaaactttaaataggtactaacataaattttttggaggctgacatgtctgaacaatatttcgaccctaagttgaaaatctttgctttgaactctaataagcccttagctgagaaaatcgcggctgaagttggggttcctttaggaaaatcttctgttaaacgttttagtgatggtgaaatccagattaatattgaagaaagtattcgtggcgacgaaattttcattattcaatcaacatctgcaccagttaatgataacttgatggaaatcatgattatgattgatgcattgcgtcgtgcatctgctaaaacaatcaatgttgtgttaccttattatggttacgcacgtcaagatcgtaaggctcgctcacgtgaaccgattaccgctaaattagtggctaatatgttaacgatggcaggggctaaccgaattttagcattagacttacatgccgtacaaatccaagggttcttcgatattccagtggatcacttgatgggtgctcctttattggctgattatttcttgagcaatgacttggctgaaaatgctgttgttgtttcacccgatcacggtggggttacacgtgctcgtaaattagctgatttcttaaagacaccaatcgcaattatcgacaaacgtcgcccaagaccgaatgtttctgaagtgatgaatattatcgggaatgttaacggtaaacgcgcaatcatcattgatgatatgattgatactgccggcacaattacgttagctgcgcaagcattgaaagatgctggtgcaacagaagtattcgcatgttgtacacatccagtattgtctggcccagctattcaacgaatcgaagattcagtgattaagcaaatgattgttacagattcaattaaccttccaaaagaaaaattaatcgataaaatggtacaagtttctgtcgggccacttattggggacgccatcaaacgaatccatgaaaacaaaccagtcagtccattatttgaaaacagatttaaaagataagcgtgctaactcgaacgggttagctttgaggaagcacatttcaataagctaacaattaaaaacgcctgaacaatttgttcaggcgttttttgtgactttatttttctttgttagctaataaatcgcgaatttcttttaagtaaacttcttctttcgtttcgactacttgtgcttcttcttcttcggtcttcttgcccatgtcacgaagcttgttgaatcctttgacgattaagaagacaacaaatgcgatgattaagaagttaatcacatcgtttaggaagttcccgattttgaaaacagccttggtgcctggaatggtaagcgcaataccggatagatcaacttgtccaacgaataatgaaatgattggattgattaagttctttgttaatgagtccacgatgctttttaaagcagcccccaaaataaccccgacagccatatctagcacattaccacgcataataaattctttaaattctttaatcatgaaaacgacctccattaatattattaattattgctacaaaaagtataccgtatttccagagcctataaaataaaaatgctgtgctagttacataattaaccaataaatttgttattttcatgaaaaatcgttaagatagtcacaggaattaaataacagaaattagagatagaggaaccttagatgaattggattgtacaattgtatcaaccattctttgaactgagtaattggcaaactgtcattacgtcgtccgaagattggcttttaattttaacgttagtgattatggaatgcttactctcagtagacaatgctgttgtattagcggcacagacacaaacattacctacaaaaattgagcaagaaaagtcattggtgtatggcttatggggcgcttatgttttccgcttcattattattggtgtcggcacctatttaattcatttgtgggaaattaaagttgccggttcattgtatttaatttacttagtcattgcttatttcagaaagagtgggcatccgaagcaggctaaaacaccggaggcgggttctaaaatcagtagtccgcatcggttctggcgcacagttgcttcgattgaattgatggacattgttttttcaattgattccgtattagcgtctttagcgatttctagtaatccggtgattgttttaattgggggaatgattgggattatctgcatgcgggggattgcccaactcatcgcccaattgatgaagaaaattccggaattaaatccgatggcttacatcttaattctcttcatcgcgattaaattattcttgtcgattccagccattgactatgaaattcctaacctagtgtttgctggaattgtgtttggcgttattctactgacgctcattattcattatgtccgtgcagcacgggctaaataggcatcataaaaaagccgttgtggacaaattgtccacaacggctttttacgttacatatgattgagtaaaacagttaaggctgcaaatgcgacacttgcaattgcgactaaaatgaattgatgctgtttcattttgagaattgcaatgaattcacggatgattgcatttggtaagaagtaacgcgatgttttagcgccaatgccatctgctttcaaacgggcttgctttgcaaaaagcccagcgcggaatgtgtggtaattattggttgcaagaataattttaggattcgttttagtggtatcagccattataatgtcttttgaaaattgcatgttttgtaaagtgttgactgatttttcctcggtgagggtgtctttaatcggaatcccttgctcaatggcgtaacgttgcatggcaactgattcaggcagcttctcatccggaccttggccgccagaaaagaccagttttggtgcagggcggccttttttgacttgtttatcataaaatcgaatggcgcgattaatccgactggccagtaacggtgggacgaattgaccatcgattaaaccgctacccaagacgatgatgtaatcttgttgataacgggggcggttgaattgatagataatcagtgaggttagatataaatagaagaacaatggaatatacaaaagaaaaaccgatacaatcgtgctgacaaataatttaacatcggcgggaatgtgtaacaagcgcgtgatgattgggatgaaaaatgagccaatgatggctaacgcaatgaggagggtcagcatgttggataacgtgtgactttcttttttccagacaatatacgcgttccacagcaacaagacaataccgaataagtagaagaacatgacgattagaacgacaacaattgcagcagcaattgcaatgttattcagcgtttcgttattgaggcgaatcacaatgagcgcagcatccattaatgcgctgaagaggaaaaagttaaacacaatgccgttgattaaccggcgtttttcaaatcgctgtaaaccaataaataaaatcaaaaagaaaaggggggacgcgtaaacgagatcaattaacgtagtcataataactccccttatgattaggcttgcctttcaaaggcgtatgtttcaatggcgtatgccacgccatcttggccttcatggttactcttagtaacaaccttagcaatttttttcaattcaggaatggcattatccatggcaactgggaagccggcgtattctagcatcgataaatcgttaccttgatcaccaatggccatcacttcagattgatcaatatttaaggcatttgctaaatcacgcaaaccatttcctttaccggcgttcttgttgagtacttcgaggaagtaggcttcactttgaacaaattgataacgatcgaaaaaatcagcaggaatcttggttttggcttcagctaagacggcgggttcgtcgattaacatcacttttgaaaaggccttgttaggtgcgatttcatcgacatggcggaaacgaacaggcatgttgacgagggcactttcaccgactgtataaggactgatatcgcgattggcggtgtagatgaattgatcgtcttcagcgtgtaaatgagaaccaatttggcgggagagggtttcaagttcaagatattggtcatgcgcaagagtgtgacgcactagaatttcaccagttgccgtattttgaaccaaagcaccgttgaacgtaatcacatagtcagtggcttcagttaaacccagttcttttagaaaaggcgtgaccccggtgagtggtcgcccagtacatagcacaactttaacgccatgttttttagcagctttgacaactttgattgttttagggctaaggatgttattttcatttaatagggtaccgtccatatcgacagcgacaagtttgattgacattataaaaactcctttttagtggttaggattgattgcaccgttacgcaagtatgctttgaactggcggtatattggtgcgaagacttcgatatcattttcgttgagcatttctttagggaaatagaagcgttcatcgccgctaaaacggcctgagatggcggctaccaagtcacttaatgatgataactcttcaagttgaccatcagattgtataatttcaatctgagttttgggtgatttagcggagggatcataggcgtcgtacggcaaatcgaaactgttattaacagcagtgtaatactcactgttataaccagcttgctcggttagcgcccgtaattctggtaaaacacgttgggtctgttggctaaaggcaaccgatttgagtgggcggcggcttaaaaagcggtcggccaaatcattgagcactgaatccggatagtctaaccagtatagaaaataggtattcaaaacgccatcatctaattttaaatagtcttgtaaggtgaagttctgttcgaaaaatggaatcaataattgcggtgcgagactctgatgatggtcaggctgttgataaagaaatttcgcacgttgcaagagcttttgcaagataacttccatgccgcgtgaaacaggatgaaaataaacttgttgatacatctggaaccgactgacgatgtaatcttcaacggcgtgcatcccgtttgctaaaaaggcaatgcccttatcgtaaggccgcatgactcgtaaaacacgcgtcaaatcgaattctccgtatttagtcccagtattgtaagcatcccgtaataagtaatccatgcgatcagcatcaatctggctggaaatcatctggacaacttgtggattcggataagaatgatcgattacactagcgactttcgcagggaaatcatccgcaacttgggttaagacgcgattaatggctgtctccgggttggtgataatttggcgcgtaatcaattcatgatcagtattgaagatgtgttcgaaggtatgtgaataagcgccatggccgatgtcgtgcaataaagctgcacataaggcgactaaccgttcatcatcgttccaaagtccatcaccggcaacttgactagggtagttaagttggaattgatcacagatttggcgtgtgatttcataaacacctaatgagtgggtgaagcgggaatgttcagcgccttggaaaacagaggaagtcgtgccaagctgtttaatccgccgaagacgttgaaattcgggggtgtcaattaaatcgagaatcacttgatactcgacgcgaatgtagttatgcacaggatcacggaatactttttcacgcgatagtttaatagcggtgttagtcacaatataatctcctttttgaggcccgttaaacttgataacggtggagtgctgtttgttttttaagtagtagttgttgataagatttcgtttgtaattgtggtgtgaggtcaactagttgtggttgttgaaccaaccggctaaaagcggtctgtaggtgcgtaatggctgttgcaacagtcattggttcgtttaacagatcagataggttggccatggtgtccgggatgaccgctgggaaagtccaccgcgtttggctttgtgcttggccagcagtgtaaaaactgtgcatgagtttgccacgcgcctgttgattgcctgtaatgctggcatataagagtacggcaattccgtttttggcacggcgttgggcaataccggcaaatttttgaccattgatgctgagatcgtattcgccagggcaataggagtgagtgacttcgaaatggtcaatcgtgacgggatagtctgcaaaggcagttgtgaacaattggtgcatgagcgcgtaagcggcattaatgcttaggtgatccgccatatcaggaagatagaagctgacgttcaaaacgccggcatccgtcacaatccccaaaccaccagcgttacgcacgaaatgggcatagtgtgcagcctctaatgtggcaaccgcttgtggataagcaggtaactttgtatccatcatgcccaaaataacattgtcagcaagcgtccaaaaatgaataataggttgctgtaattcgcggctcaaagctaagaggctattagcatgagcaaaagcgagtggtccagccgctttttcaaaatgttgggttaaaatagcccattcttgattggcagataaagtcgctaaatcatccatggtaatcacctccgaaaattaaaaactcttcttaattatagcgtaaattctaggcgctgtctgcaatcggtacgttggtcaaagagaattggcggattattctggcgctcaaattttgaatggcttataatggaactacttaattaaaattaaaggaagttatttatggcaagtcaaagcggaattccggtcaaggtacaccttgaaacgcaaattcaacaagatgggcaacttgaaaaacacgttttcgatgaggatggtcaagttgtcaaaatgggagagtccctttacttacgttatctggaacacggtggtgaacaagccaccgcggtacggtttaaattggctgctgacggtcaaattcaattaacgcggggcacagaagaagacgagacgcaattgcggttgtactttaagcaaggtgaagacctcggatcaatttaccaaacaaaatatggcaacatgccagtgctcacaacgacaacccatttattatcgatggtgaaggaacaaccgttatcaggtgaaattacggttcattaccaacttgccatcaataatcaagccgtgggggattacaaattacgattgatttttacagcttaagctagtatgattaaggatagactgttgaaaggacgtgtactggttgaaattagacgtttttaaaggccaaaataaagaagaactatcaatgattgaagtcgcacatgcaattttagaagaaaaaggcgacacgattgcattcgctgacttaacgaatgaaattcaaaactatttaggcaaaagtgatgaagaagtgcgtgcacgcttatcacaattttatacggatttaaatgaagatggtagtttcatttctttaggcgaaaacgtttggggcctccgttcttggtacccatatgaatctgtcgatgaagaagttaaccatccagaagatgaagaagaccaaccaactaagaagaaacgtcgtaagaaggttaacgcattcttagcagatgttaccgacgatgacgatgtgattgattacagtgacgatgatccagaagacgaagacttagatgctgatgatgatgttgatttagcagctacagatgacgttgctggtgatgacttaactgaatacaaagctgacttacaaaacatcggtgacgatgacgatgatgaagacgatgatgccttagaagatggtatcgaaggtcaattatctgaatttagcgatgatgatgaagacgacgaagacgaagatgacgaactttaattagacgtttccaattcgttgccataaaaaaagacgccaaagttaactttggcgtcttttttttgcgtgtaatattttttaagctaatcctcgtcggatacccgatttacgacacactctcgttcaagaaaatggtaaaccgcgccgattaagttggcgtcttggttgaagtgacaaatttcgatgtgtggcacaggaataggggtggttgcccctgcacggcgttgccagtaacgattaatactactattgtcatcggctaaaagtgcgtcaatcgcagcgtttaattttggtagtaggtcagttcgctgactaatgccaccaccgacaccaataatctcgggcgtgtaagcaacgtttaaaaagagcatgatttccgcaagggcagcatacatctgtgtgacttcttgggtggcaatcggatccccttgatcggcaagttcgaagacggttttgccatcgattgtattggggagtttaaaattacggagggagacagtcttgccaatttggacgggtgagacttttgaattgttgagtgttttaatggcatctgcgatgaatttttcgaagttatcgattttatcagcagtggttttgagaatggtcccattttcgataatggataagccaatcccagaaccaattattgtgaataaggcgctcagatgaccttgaccaatcccagctgtcatctcggcgagtgctgcactgtcggcatcattttggagagagacgggcagaccaaggcgcgttgcaaattcagtttgaaattcaccgaggtgcaaaaatggcacataactcatgccatggatgatgccagtctgttcatctggatcaccaggacaactcaccgcaattccagttaaatgaaagtcggtcgcaaattgattacgtaattgttcaacttcggaatagaagcgattgcgtgttagcggtgtagggaattgcgcttggttaattagttggtgtttcgtccaaatcccatatttgacggcagaaccgccgatatctagagctagtaacgcgtcttgtagcatggtgggccatcctttcaaagtaggtcatgcaaatagtgtagcataggcgatttaaaatcggcgcagaaatgactaatttttttgcttgacgctaattgccatttcttgtattatattctttgggcgctttgcagttactttaattgcgaagccagaatcggttaacaggctccctgttcattttgaatagggagcttgtttttgtttttggttgtttcccaaaagcatgaatgtttagcgtaatgctaagaagaaaaggagaatatttatatgaccaaatatgtttttgtaacaggtggcgttgtttcttcacttggtaaaggaattgttgcggcttcacttggtcgtttgttaaagaatcgtggattaaaggtaacgattcaaaaattcgatccatacatcaacgtggatcccggtacaatgagtccttaccaacatggtgaagttttcgtaacagatgatggtactgaaactgatttagatcttggccattacgaacgttttatcgataataatttaaataaatattctaacgtgacgacaggtaaaatttattcagaagttttacgtaaagaacgtaaaggtgaataccttggcgcaactgttcaagtcattccacacatcacaaacatgattaaagaaaaaatcatgcgtgctgctacaacgactgattcagatatcgtgattactgaaatcggtgggactgttggtgatattgaatcactaccattcttagaagcacttcgtcaaatgaaggcggatgttggcgcagaaaactgcatctacattcatacgacattagtcccttacttgaaggctgccggtgaaatgaagaccaaaccaacacaacacagtgttaaagaattacggagcatcgggattcaaccaaacgtcttggtttgtcggactgaaaaaccaattcctgatgacatgcggaacaagattgcccaattctgtgacgttgaaccagaagccgttgttgaatcacgcgatgctgaatcaatctacgatattccattgttattgaagaaccaaggcttagatgattttgtcttgaaccacttcaagatgacagcaccagaagctgacatgacagaatggattgatatgttacacacaatcaagaacctcgaaggcacgaagaagattgccttggttggtaaatatatcgaattgcaagatgcttacatttcagtgaacgaagcattacgccatgccggttatgcttataacaccgatgttaaagtgacaccaatccaatcagaagatattacgcaagaaaatgttgctgaaacattagctggctttgatgggattatcgtccctggtggtttcggtgatcgtggtttagaagggatgatcctttcaattcaatatgcgcgtgaaaatgatgtaccatatcttggtatttgtttagggatgcaaatggcaagtatcgaatttgcccgcaatgttgctggcattacagatgcaacaactggcgaagtacacccagaagcaaaacataaattaatcgacatcatgtcagatcaaaaagatttagaaaacatgggtgggacacaacgtcttggtttatacccatgtaaattaaaaccaggtacaaagactgctgctgcttatgataaccaaagtgttatccaacaacgtcaccgtcaccgttatgaattcaataacgaatatcgtgaattgttgacagacaaaggcttagtctttgccgggacttcacctgacaaccgtttagttgaagtgatcgaaattccagaaaacaaattcttcgtggcagctcaatatcacccagaattcctatcacgcccaaacaaaccagaaggcttgttcaaggcatttattggcgcaacaatgtagagtgctgactcgaacgggttggctttgaggattagccacatcaggcggattatcgacaaggtcggtagtatgactgatgtggctaaccggaatatggagcacgtctcataaaagacgctactagtcagcacgacaaagtagcgtctttttgtatgccgaaaaatagttgtgaaaatggagatgatccgttttgaaaagccttacatttttagacttctacagcccaattgaatgcgatgattagcttttactaagtatgaaaattaaaaagtaaatgttatccctaaatgccttgtaatttatgtgctgattaattattattatacatgtatgactaattatcaacggcattgagtagattggagccgttttccaattttaaaaaataaaactaaaaaattaaaaaacttaaaaatatcaaaagcgccttctggtttaaaccacaggagaagtgggaaactgaaggcggttcttttgttgcagagcgaacggggaaatctaaaaatgaaaaaaatgttaattcaaggtggcaatctcttatctggagaggtcacaattggcggtgcaaagaatagcacggttgcgattattcccgctgctattttggcggagtcgaaagtcattttagactgtgtgccgcacattaaagacgtcaacagcctactatccattctagaagatatgtctgtctcatctacttttgctgatgacacggttgaaattgatccaacccacattatttcgacaccacttccaagcgggaagattcaaagtttacgcgcctcatattatttcatgggggctttattaggtcgttttggggaagcaatcgttgggcttccaggtggcgatgatattggtccacgaccaattgatcaacatattaaagggtttgaagcacttggtgcgacagtgactaataaccacggtgctatccaaattaaggcaccaaacggcttacacggtgctaaaatttatcttgatatggcatcagttggcgcaacgattaatttattattagccgctgtccgtgctgaaggacaaactgtcattgaaaatgcagcacgcgaacccgaaattgtggatatcgcgacattcttgaacaatatgggtgctaagatccgcggtgctgggactgacattatccgcattgatggggttgaacatctgtatgggcgcaatacacacaccattattcccgatcggattgaagcgggaacttatttaagtatggctgcagccatcggggatggcgtgaacgtcaagaacatcatcagtgaacacatggacgcttacctcgctaagttagaggaaatgggcgttaagatggatgttaaggaagatagtatcttcgtttatccatcacctaatttaaaaatggttcaaattaaaactatgccatatcctggatttgcaacggatttgcaacaaccactaacgccgctcttattaaaagcgcaaggtgaaggcattgtggttgataccctttatcctaaacgaacacgccacgtcccagaattaattcggatgggtgcagatatctcaatcgaaaatgatgtgattattttacatcatgccgacaagttacaaggtgccgaagtatccgccgatgaaattcggggcggtgcttgtttaatgatcgctggcttaatggccaatggtgtgacaacgattgataacgcaagtaatattttgcggggctatgaccgcgttgttgataaactaacgggtctgggcgcaatcgtcaaaatggttgaagaataagttaaccatctattgttttttgttagcattcatgctaatatttaatggttatgtaaacaaatatctctgacatagcaaatatctcagggcaagacttaagttgtgcatctgaattgatgcagataactttagcaaaaaggagcggaaaagacatgaaacaaggtattcatccagattatcacaaggtagtatttatggattcatcaactggcttcaagttcatctcaggttcaactgctaactcagctgaaactgttgaatgggaagacggtaacacatatccattaatccgtgttgaaatttcatcagattcacatccattctacacaggtaaacaaaagtttactcaagcagatggtcgtgtcgatcgtttcaacaaaaaatatggttttgcagacaagaacgctgccaaataattattttgaaaccggggaatttttccctggtttttttttgcctttttttccataaaaatagccaattgcaaacggcaatcagctatttaatcaacattttttgaattcgatgactagcgagacacgctagcaaaatgactgggaaaaattgaatcgggaaaagaaagagtaacaaagtagcagtgacgtacggttgtgccacaatcaccgtacaactgacagcgacaaccgtggcaaccaggaggccgggagtgtatggcaacacaacggcgagacttaaaccgattgccgcacttgcaaaaatggctgggaaaattttaccgccccgccaaccaaaggcaaatagcagattggttagaacggtttttccaagtccgattaagagtaaataaatgaatgattgatctaaaccggatttggtaaaggtgaacaagtagtgttctccagaaaagagtaaataaggcgacaatagaccacaagcacccaagaacacaccagcgatcattgcaagtaagaccggccgctgaatcgtatcaaagagccactggcaccattgttctatttttaagaatagattgccaaaaactcaaccgacaattaatgctaaaataagaagtggccaaaccattaatgtccaatgaatgattggtgtgtgcagtgtaaatggactttctttggggaagagttggttgaccaaggcgaaaccaagaatcccagtggcggttgtgagaatgtataatagaacttgattgaagtgtgatttgaaatgatcgcgcaaggaggtcgtctcaatcgcctcaccaacaccggctagtggtgcgtggaagatggccgctagcatggcaccaatccccatcgtcaaaaacgtttctttttgctgagcggttagtttaagtcgatcgcccaaccaagtgattagaccgccgacgatggtcgagagcgcggcttcagggccaaggctagcgccgcaggctaatacaactaaggtggcgataatgtttttaccgacttgctgttggtaggcaacggacccggtttgtttaaattcgctgagtgtttcatgcattgttttaggataaggcccccaataacgttgcattaagccgacgagtaatccgccaaatagaccaacaagcaacggataaaatggctggttgaaatgcgaataaccgacttgccaaattaagtgtgtactgaaattaatgagggctaaaaaggcggccgctatgccaccaatcaacaatcctaaaagtaagctatataaaacaaaaataattttaaactgcgtggttttagtggtaggtgatgacatagagcctcctagttaagggaattatttatgaactattatgcactacccacgctagtttgaccatagtcgaattgtgagggaaagaataatgaaaatcgatcgattacaagcatttagcgatggcgtttttgccattttattaacactattagtgttagactttaaagtgccggactatcaagcagggcatttgagtcaagcggtgattgcacagtggccaactttggctgcctatgtactatcctttttttatgtggggacattatggttgtttcatcacgattattttgcgaaaataaaacaagctaactggcagttaaacgtgatcaatctcagtattttatttgcagtgacactgattaattacccaactagtttgttgtcggaatcgattgctcaacaaaatggcgctgatattcgatttgcttttacatcgtatgcgattgttgcattagtcatctcagctttgttttgggtattatatcggtatatggcactgcatcatgaactaatgcgtcagtatgaacagcgacacgaggaattttatcaaacgattaaaaatgatcccttacgaagtgtcttgatttacgccattgccattgtcggaattcagattaatagctggctaggggcactgttgattttgctgggcaatatctttcatttcatcgcatacttgcgacttagtcggagtgtcacgctgtatcatttgaatggaaaggatgaataacatggcaaaacaaaaaacaaattggcggtgggtagattggctttatgtcttcaccattgtgagtcaattaatctatattggttattacttagaacaaatgctgactaaccccaaagacaacggaacattgtcttttgccgttttacaagtggttgcaggcctggtgattgcgaccttacctattatcattgaacgctttatgccataccggtttccagagattctatatgcagtttatttaatctttgtatactgttcgattttattggggacgggattacatttttatagtcgcttatactactgggataaattcttgcatgtcttgagtgccgggttattggcgggcttagggtatacggtctttaacgtattgatttcaaaacaactccgtcaaaccatttcagccttactcatgagtttgtttgcggccacgtttgggagtacgattggtgtgttgtgggaattctatgaatttaccggcgatagtttgttaggcttaaacatgcaacgttatatggcaaaaggtcaccttttattaggccaagcagccttgttagacacgatgggggacttactagcggatgtcttgggatcatgtttaatcgccattatcggctatttctgtattaaacataaccgggactggttagataaactgacgtttaccaaaaaatagagtgcgtttgtggcgcttatattttgagcattaactggatttgacgaattggcgattgtaatcaccgatttggcaaattctgttaagcgcagaaatatgccacaaaaagcacgtttcaacaaaaaagtggtgtcgctctgaaaatgagcgacaccacttttttgtattatttttgtatttcatgttcttcgcgtaagacttttgtattctgacgcacccagaagaggttgacgattactaaaacggttgtcgataggaaaaccccgctgtaaccgaataggccagaaacgctggaaccaattaaaggtccggcgacattccccattgcttggaaggattggttataactgaaaatccgcccggcggaactatggggtgagtacttcgcaagaatcgtttgaacttgcggtaacaatgcggcatcggcgaccccaaccagcagacgcagggcaccgagttgccaaacattttgaacgaaagcttgcggaacgtaaacgaagacggcgaagatcaagccaccgagtaaaattttctcggaaccgatccgatcgccaagtgcaccaaaacgcggcgcggcaattaaggttgcgatccctggagtagccgcgacaactccgctgactaacgctacgttattgccatgatgcattaattgacggacatataaactcaacagcgggctaattgagttgttggaggcttgaataatcattgtggtgacgaacatgccgataattaaatgcgggtatttcaattcatgaatcagttgccgaccgggtacttgatcgcctttttctactggcgtgaagtcttcgtgaacgaaaaccagacagaggataaagacgatgaacaagatggtaccggtaatgaagaaggttgttcgatagccggttgcttgggcgataatcccacccaacaacgggcctaataaggttccggaaacacttccggtggtcagggtgcctaaagcttgaccacttttttcttgtggtgctgaagtggcaattaaggcgtttgaattactgatataacccgagaagaagccttgtaatagtcgcaaaccaattaattcataaatattttggactaagcccatcgcacccaggacaatcgctagtcctaatgaggcgcggagtaacattaatttgcgaccacggcggtcagcaattttgccccaccatggtgaaatcagagcggtaaccaagaaggtaatagaataggtcaccccactccataaactcagttgggccgttgtaaagttgccaagtgtgtcaatgtataacgacataaatggcataatcaaactaaaagcaaccccggccatgaaattaccaaaccataaaacgacgaggttctgttcccattgtgcgcggcgtctgaataaacgttgacgaatgttagtcaacatggtgtcatcatctcgattctaaaaagttaaagcggcgaccacgcttgctgatgtgcgtggtaggcgtcttttaagtgtgggagttgttcaaagagggcagtcagttgcgcatctttagctcgtggcagctggcgtttaaagtacaaccgctgagtgtcgtaggcagtcaatgcgcttgcttgttgggctggtgtaccgtgttcggcaaaatagagtagccaatcaaacagccattctttatcagcatcggcttcataacgggctagcaaagtgtctagctgtgctccctgtgccactaacaagtaatggttacgctgcaaaggggttaactcattatctggatttagatcaattactttgggacctaattgttcgagaaaactatccagcgaatcagcaacggttaaccattgatcgacctcagtatctatgtagcgaatcggtggttcagctgaggcttgttggcaatcaaatacaaagtactgctgttgatgctgactaaaagggactaagtaatcgggcaagtcgggggcttggatgactgcttcaccgttgtgagcaatcccagctaaataatgacactcaacgtcggcgagaccatcacttgttggctcactcgtaggaaggctaaagttagtcaaaaaaccgccattggttgtttgacaaagtgcctgataactcatgggaatccgagggtcatcgacaatcatccgtggtgcagttaaatcaacattcgcaattgctggctgtgcagtaaacatgcaagtatccctcccaaaattggtaactctttaattttaccatttatgtcaaaccaaggttttgttaaggttggcaacctattctttatttgttgtagcgagtctgataatatgaagacaacattaaagaaaagaggatacgcgtatgttgtggtttattattatcattattttgttagtggttggcgcggttggcttctatatcagcacctacaataacatggtcaagagtcggaactggacagatgaagcatggagccaaatcgatgtacaactcaaacggcggaatgacttgattccaaacttagtatcgaccgtgaaaggttatgctaagcatgaacaagacacgttggaaaaagtcatcaagatgcggaatcaattggttgaaatgccagctgataatcggcaagcaacaatggcggcttcgaatcaattaacggattcattgaagagcattttcgccttgtcagaaagctatccagatttaaaagcggacgcagaatttacgaagttaatggaagaattgacgaatacggaaaataaaattgcgtatgcacgtcaattgtttaactcaagtgcaacccgttacaacaaccaaattcaaactttccctggtaatattttggcaggtgctcacaatttccaaaagacagcttacttagaaacgccagttgaggaaaaagcagcacctaaagtttcctttgaatagggtgtgattgggaatgttatttgaacaaattcaacagaacaaacgtaaaacggtatatgtgatgattggcttttttgctttagtattggcaattggtgctgcattagggtatctgtttatgcgtaatttgattagtggtgtcgtggtggcggctattttagccgccgtttatatggcgatgatgattggaaactcaaccaacgttgttatgcagatgaatcatgcgaccgaagtccatgatgctagcgaatatcctgatttatggcacattgttgaagacatggcgatggtcgcccaagtaccggtgccacgggttttcattgttgacgatcctagcccaaacgcgtttgcaacgggcaatgatccacaacatgctgcagtggcagttacgactggcatcatggcgcgtttgaatcgggaggaacttgagggggtaattgctcacgaagtctcccatattcgcaattacgatattcggttacaaacgattgccttggcactttctgcggtgatttcaatgctcgtgaacatcggcagcaacatgttatggtggggcggcggccgcagtcgtgataacgaccgtgaagaaggtgcaagtaatatcatcggtttggttttttcgatcctattgttgatattgggacctttggcggctagtattgcacagatggcgttgtcgcgaaatcgggaatacttggctgatgcatctggtgtcgaattaacgcggaacccacaaggtttgatcaatgcgttattgaagatttctgacagtgagccaatgcaagctgcggatccatcaagcgcagctttgtatatctcagatccatttaaaggacttagtcggtcgggtgctcatttatttgatagtcatccaccgattgaagaacgagtcgctaaattaagagcgatgtaatgttttaaagacataacgcatcagctgtaggtaatagttgatagaacacgttttatatagagggaggcaaaattcatttttgtccccctctttttttgtataataaaggaaaagaggagtgatcagtgtgcgattatccccaatccagcaattaatggcgttacaatctgctctaataatgcaattgaatgagacaccgagcaaacagattaccatgattgatttaccggttgtgcgtgggcaattattattggcattgcatgcgcgtcaccagctaacattatcgacgcaacaacgcacaatgattcaacgcgccatcatcacaacgttggcaactaaaacggatggcactcaattaatggatctttggcggcaaacactaccgcagcggtatcggattgttgatcaggcagaggtggtggcccactttgagcagttagaacgcgctaattgggatgttgcgagtttacgcgcttacgcaacccatttaacgggacaacttgctgcgcaaccaacagcgcttaaaaggatcttgcaacacaattggcaagcattacatcaagtaggctcagcactttatcaaatgctttttgaagcatatggggaccgaactgcacaaccagtaattaattaccaacggatcaatttagtgctcacgcatttaggggcgcagttggatgagcatgcgtttttgcaattgacagcacgtgattatcaacttgacccgcaattagcaccagatgcgccttttttagcaacctttgcgcaaagtgtgcaacgtgcatttgtcggtcgagttttaaccgataaacggattcatcaattcagaatgtatttagatcggcagaatctacgctatatccgccattattttcaacactctggtgaaacagatgaacaagccttagcgcggtttgtgcgaaaacgacaagcgacccagccacattattggctgcggcgtgaaccagctcggctccataataaataccgcaacggacagcgcccaacaacgcattggaatcgaaaacgactcacgccggattttcatagtgaatttattctagcaccatctggagcatttatcagtcaatggcaagtgcttaaattaaaggctgatggtctgattgatagtaatcctgaccattaccagctagatgatggcacactccggcaactactaaacggtgaatcgtttaattatgctaatcggaatgatcggcaacacgcccggttagatagccaaccaccgctgcaaaatgatcatgcactacgcaaaacagcttttaaagggtggcggagtccgactaagcaacaatatcgaccaaatgataaacaggttgatgactattcacggtggtactcttaattggtggtcaatcatttttggggcttttttgaaactatggtacaatattgcgtagtattttaagccataactaaaaaaagcgtgcgtaaaaatgcacacagagtaataggagttattgagatatgaaaatgcagttgggtgaaattgcacgagtcactggggctaaaaacgatattgaacaatgggcaaccattgaagtgacgaatgttgcgtttgacacacgtcaattaaatgcgggcgctttgtttgtaccgttagctggtatgcgtgatggtcacgactttgttggacaagctaaggaaaatggggcagtggcaactttttgggctgccaatcatgatgcacagccaactgattttcctgtattagtggttacagacccactagcggcttatcagaagttagccatgcattatctccaaaaaattaatcccaaagtggttgcgattaccggtagtaatggtaaaacaacgacgaaagatatgacagctgctgttttaggtagtcagtacaatatgcacaagacacaagctaactttaataatgaaattggtgtgccacaaacgattttatcgatggaagctaatactgaaattttagtgattgagatggggatggatcgcccaggtcaattaaaagcgctcagtgaattagccatgccagatgtcgcagtcattacgatgatcggggaagcccatatcgaatttttcaagacgcgtgataagattgccgatgctaagatggaaatcacagatgggctcaaagaagatggtctattaatttacgctggcgacgaaccgctattgactgaacgggttggcgaactcacaaccgagacattcggtaatttgacgaccaatgacttatatcccttacaagtccgtgcaggtgaaactgaaacgtcattcaagttgaatgcttggccagagatgacgtttacgattccaatgatgggtgcttataatgtcaataatgcgttggtcgcaattttggttgggcaacggttccatattaaaccagaattaatgaaaaaagccttggcgaattttgaagtcacaagtaatcggacagagtggcttgttggtcaaaagggtgaacggatgttgagtgatgtttacaattcaaacccaacggctgccaaagaagttttacacaatttcagccattttgagactgacgggcggcggattgccgtcttaggcgacatgttggaacttggtactgccagcaagaaattacacgaaagtttggcccaagaattagatcccacgatgattcaagaggtcttcttgttcggggatgaaattgaaccattatatgtgacgttaaaagagcgttatgcaccagaacgcctccattactttaaccgccatgaacaaacgcaattaattgctggcttgcaagcgcaggtacaacctgacgatttaatcgttttaaaggcaagtcatggcttacatttagaaaaagtagtcgctgctttacaagatactgaagttaattaatgattagcaattgacagacaactgcacaggcacgctgtttagcgattgaagctatggaattagattaacaattggagcaattccgtttgctaattaagttgtggcatgataagctattaaggagcttttttaatgaaaaaggcttttgaaaacaattatattacaagacagatttttgaaaatggtgcaattgacgaagtggacctgttttgtaatggcatgttttttacaaaacaaggaggaacactatttgaaattcgcagaattaggtttatcagaaccaattatgaaagccatcgaacgcgctggctttgaagaagcaacacccatccaaggcgaaacaatcccattggcattagctggtaaggatgttatcggtcaagcacaaactggtaccggtaagacagccgcttttggtttaccaatcttacaaaacttagacttagacaatcctaacattcaagcattgatcatttcaccaacgcgtgaattggcaatccaaacacaagaagaactctatcgcttaggtcgcgaccgtaaagcgaaagtacaagttgtatacggcggggctgacattcgtcgccaaatccgctcattaaaagatcacccacaaattcttgttgggacaccgggtcgtttattggatcatatcaaccgtcgcacagttaaattagaccacgtgaaaacattggtcttagatgaagctgacgaaatgttagacatgggcttcgttgatgatatcgaaagcatcatcaaacaagtgccagaccaacgtcaaacacttttattctcagcaacattaccagcaccaatcatgaaaatcggtaagagcttcatgactaaccctgaaatgatcaaagtgaagtcaaaagaattaacggctgacttaattgatcaatactatgtgcgggcaaaggacttcgaaaaattcgacattatgacgcgtttattcgatgttcaatcacctgaattaacattaatctttggtcggacaaaacggcgtgttgatgaattaacacgcggtttgaaggctcgtggttacaatgctgaagggattcacggtgatttatcacaacaaaaacggatgagcgtcttgaaatcatttaaggctggccgtttagatatcttagtggcaacagacgttgctgctcgtggtcttgatatctcaggtgtgacccatgtttataactacgatattcctcaagatcctgatagttatgttcaccggattggccggacaggtcgtgccggtaagtcaggcgtttcagttacttttgtaacaccaaacgaaatggaatacttacacatcatcgaaaacttaacgaagaaacggatgttaccattacaaccacctacagaaaaagaagccttcaagggccaattagctgcagcggttgcagacatcaactcaatgattgaaaaaggccaattggctaaattcagtgaagaagctgaagaattattgaaacaattctctgacgttgaattagcttcagtgcttttgaagacaatcagcaaggaatcagttcctgttaagataacaccagaacgtccattgccttcacgtaaaaaaggtggcaatcgtagcggcaaccggaatggcggcggcaatcgtcgtggcggtaacggtggcggctatcgcggtggcaatcgtcgtggtaatgacaacaaagacggtcgtcgcaacagtggcaacggcgatagcagcaaacgtcgtagcaatgacaatcgtgacaaccgtaagaagactgatggccgttcaaaacggaacttcacaattcgtacaaacgataaataagactttttaaaaacagcgggcggccaacttggtcggccgctgttttcatatagtcaattgtgacagagatgtaagttcagtctctgtcttttttgtggtaaactaattaaaaatagggtactaggggcgaagacgatgattgctggattaggcattgatttagccgaaattgatcgatttgaaaaagcacagagtaagaatagtcattttgctgaaaaagtattaacagctaaggaatatgaactgtttaaacggtatacggggcgccgtgcgttagaatttttagcggggcgctttgcagtgaaggaagcttttagtaaagcttatgggactggtattggacaggtacaactgcaagcgattgaaacgttaaatgatgcaaagggcaaaccctacatcaaacaagatttatttgagggaactgtccacgtatcactttcgcatacaacgacgttagtgatggcagaagttattttggaaagaggttgagacgatgacagtcggctacttacgaccaacacgcattctagttgatcaaaacgcaatttatgaaaatattcaaaatgaactaaaggatttaaaaggcacagatgcagtgattttccctgtcttaaaagcaaatgcttatgggcatggcatgattcctgttgcagaagcggcccaagcggctggtgctgcaggattttgtgtggctattttagatgaggccttagctttacggcgtgctaactttacggaacccattttggtgctagggattacacagcccaccgaaatcgaattggtgattgccaaccaaatctccattacggtcggctcactcgaatggttgcaagctgcttacgaaattgcccaacaaataccttatccacaaccaatgcacattcatttgagtgtggatagtggtatggggcgaattggttttagaaatgcgactgaattactagcagcagccacatttatcaaagcacatgcgaaatattttgatttagaagggatttttacccatttcgcaactgcggatgatcccgatgatacttattttaaagaacaaagtgcccggtttaatgaactagtagccgtgttaccagaatgtccacgatttgtgcatgtttcgaattcagccacgagtttatggcactcagcttgcaatgagaatttaattcgaatgggaattagtatgtacggattgaatccttcagggaatgcgattcctgaattgccttatgcattgaaaccggcgctaagtcttgaatcagaattggtctttgttaagcaagttgaagccggaagtaagattggttacggtgcgacttatgaagcgagtgaatctgaatggattgggacgattccaatcggttacgccgatggttggtctagacggatgcaaggctcaaccgttttggtggatggacatcggtgtgaaattgtcggtcggatctgcatggatcaattgatgattcggttacctaagcaatatccagtggggaccaaagtagtttttgttggtaaaagtggtgatgacgaaattactttacaagagatcgcagattatgcagggacgattcactatgaaattatctgtggtttatctgatcggttaccacgggtttacagtggaattgatgaacattaaggattaagaatttgattatcgccagttctgtggtaggatgaataaaggttaaagtgttgattcggaggttgatgcagatgaaagctaaccgtgaacaactatccgttaaattagacgttgagttggtccaagcaattaagcagtattgtgaggtgtatgcccttgatgagagtgatttgattcaagatgcgcttcacgaattcatggcgaccagacagtcaaaagtagataacgtcattaacgggtacgctgagatggctagcatcaacagtcaaattgcggctgaatttaacgcttgcgaaagtgaggcgtacgcacacattcgcgtagttgattgatcctaattggagggagaacaagtgggagaattaatacagcgtggcgatattttttatgcggatttatcaccagtggtcggttcagaacaagggggcatgcgtcctgttttaatcattcaaaatgatgtgggtaatcaccatagtccaaccgtaatcgttgccgcgattacagcaaagattcaaaaaccgaaattaccaacacacgttgggattacggccaaggataatggtgtcgaacgcgactccgtgattttattagaacaggtacgaacgattgataaacaacgcttgaaagatcgcgtcacacatttagtggcggataagatggcacaagtcgatcgggcgctcaccattagtgttggacttaaagcggtcttaaatccttaatacataaataccaaaaagaaagaatgaagagaacccgcttataaaagcgggttctcttttttttgacctttatcaacagccggtaaatatgatatgatggtagctgttcgaaaaaacgtggttcgtaaccatcccacgcaaaaaaactaggaggattcaaagatgacgaatcaaagtcgattaaaaacggtgattctaaacgggttagtggcagcattatacgttgttttatcgttattcccaggtatgttgggatttgcttcaggagccattcaatttagaatttcggaaggcttaaaccatttagtggtcttcaataagaaatatctatggggtgttttcggtggggtattagtgttcaatttctttttcagttctgaaaacaagttactcgatacgctttttggtggcgggcaaactttattggcgctgcttgtattaacgcttgtgatgccctatttaaaacaaacttggcaaaaaatggtggtcaatattctcttgttcaccgtttcgatgtgtatgattgcgtggatgattgtgttaaccggttctactgctagcacacacattccattctggccaacgtatatttcgttggcactttcagaagcagtcatcatggtgattaccgcaccagtaatgtatgctgtggataaagttgtgcactttgatgcacaaatgaaatcataaagattaaaaagggcagtcctaattaggactgcccttttttgcgttaaactaaatcatcaagtttggagtcatcacggagcgccttatcagattgtaaatcatcgatttcaggaacacgatagccttttttctcgagcttataaacaatctttttcaaaatctcaagatcaagtccagcaggcaaggtgaaaagggtgcgtcgtacgaattcatcttgcttagcatctaaggtgatgcagctggcgattgaggtatatttagcgataatcttcgacatggcaaccaaatcaccttgttcaccagaagaaagcacagtgagtacatagctacttaattcgagattccacgcttcagaaagcatatttaataacgtgctatgcgtgagaattccgtaaaaattgctatcttcgtctaatacggcgatgtatggcaaatctttaatgttgaagaatactttgaaaaacggtgcgtcaactggaatatacttggtcatattcttcaataagctggtcacgggaagctgcatatcgcccccttgagacttatgacggtagatgtgcatcttatagatgttaccgcggaagatcttgccgctagcatctaggacgggcacacaacggtaaccagactcttctagtagctgtaatgcttcttctaaggtcaccgattcaacaattgtggtgagacgttctttaggtaaaactagggatttaatgagcataggctttctccttagattaaaattctctcatatactaatgtaatcatagcataccaccaagcagattaaaataactagtttttcgactcagcgaaaacttgattagtaatcgatgagaaagaacgtgaaatctaagcaataaaaaagcagggataaaagttaattttattcctactttgtatttaatcgttgagcttactttttctaaacgaattctgtaggtcagctacctctggttaatccgtagaggagaggtgttgctagtacactacgtctaaatcactacaactggaatgccttcgctaacagtatcgtagagtttagccattgtgccaggtggggtattgatacagccgtgtgagccgtgttctttataccagtcaccaccgtacttaggttgccatggcgaatcatgaatcccaacgccagtttcatcgattggcatccagtaattaactgggcttgcgtattcgctgaccccatcaaagttcttccccttcaatgtggcattgcgttctttcttccaaacgctccaaacaccggttggggtgacttgtggtggacgtgctgaaacgatatcagtgtcaattgtgaccttaccatcttgatagagccacatatgttgggcttttaaatcaatttcgatgtaggttgaaccgacactacgcgttttctgatcagttccggaaccacggataacagctgttcttgagaaatctttgcccttaggcacttctgtcattaaggcgttgatttcatcggcaggagagatactccacccataaattccagctgggacagtgactgtgccttcttttgtagaattgaaggtcaaatctttgtcaaaagtatcatactttgcctttaattgataaacgtatttggtaacggcagctttatctagactaattgtaccgttgttatacgttaaccaactttggatgtcttctttaggaacttggaaatcattaccattaactgaatagctgattttttcattagcaatcgtcttcaattgatcggcagtttttttcaattgcttgtccgtagatttcacttcaggttgcgcataatcgttttttaagtcgattgttgcttgaccttggttaataccgtgggcaactgcttttttgaacttagcggcatcaattgtgttcccgtagacttcttttacgagatcgaactgatgattctcgaggttaatatgggcattctctgaaggtttgcgatcagcgttgaccttttcgagggtttccgttgagaatttgtcaaaatcagcggcatttaaaatgagtgcgtcttctgatttagttgtttgttcactggcaaaaacgtggcctagccaagaccaaccgttttggcttttttcaatcttttccaataacggtttaaaattatggctaaagccagcttcttgaccgctaaaagttagcaatgtttgattgttatcctttagcgtatatttttgacgattcactttttttaagagttctgtgttagcgtctgcgactgattggccactaatgttgacaccggcaacggtcgtatgtggcaagaatgctttttgataatgaagactgactgccgagtaacctccaacaaggataacggctgctacgccaagggcgacgtaggctttcttcgtaagtttcacaacctcaactccaatctctgcataggttaatcataccccagtatcacataaaatacaaaggcgttaactaatagttagcatacaagatatgcacccaaaaagaaataaaaaagtattatttttaataaaaaatatgtagttgataatattaacaccataaaaaaacgactctcattaaatgagagtcgtttgaccaacagcaaagagcttattggcgagtttcgatatctaattcagcaaatgcttttgtaacgatatcttttaattgttttgcagaacggtgcatgctttccatttcgtggtctgtcaatggaatttcaaggatgcttgtgatacctgagcggttaataacagcaggtgaaccgataaagatatcgttcaagccgtattggccttccatgtatacagataatggtaagacagcattttcgtcgtctaagatagccttagtaatacgagctaatgcagtaccgataccgtagaatgtagcaccttttaagttaatgattgtgtaagcagcgtcacgaacactttcgaagatcttaacaagttcttcttctttaacttctggatgagctttaacccattcagaaatcttgataccaccgatgttagcgtgtgaccatacagggaattctgtatcaccatgttcacccatgatataagcatggaccgaacgtgcgtcaacgttaaccatttcagcgatgtctttacggaaacgagctgagtcaagtgatgtacctgaaccgataacgcgttctttagggaaacctgataatttccatgtagcgtatgtcaagatatcaactgggttagcagcaactaagaagataccgttaaagccagattcaacgattgggtcaacgattgtcttcaagattttaaggtttttacttactaagtctaaacgtgtttcacctggtttttgtggtgcgccagctgtgataacaacaacgtcagcatcttttgcatctgagtattcagcagcatagattttcttaggagaagtgaaagctaatgcatcagataaatcgattgcatcaccttgtgttttttctttaaagatatctacgataccaacttcttgtgcaataccttgtaaagttaatgcataagcgtaactagaacctacagcgccgtcgccgacgaggataactttttggtgatctttttcaatgtttgccaatataatgacgtcctttctgtaaatcaattcttcatttcgaaaaccagtatagcataatttacaccaaagttcgcgatttttggttaaattttcagaaaactatttctttcacaaagagagaaataaactgaatatggtataatggttcttaatatcaactggcgactggggagaattaactgctcagaatttttgcgtgatagcgccagtcaaaaagaggacgttaataatgaaaatgattgttggcttgggaaacccaggcagtaagtatgcaaagacaaaacacaacattggttttatggtgattgatcaattatgcgaacggtttaatgtgaccttaaacaagcatgattttgaagctgaatacgggagctttaaatatgaaggggaaacgattttcttagtgaaaccactaacgtttatgaatgattccggtcgttcagtcgggcctttaatgaaatactaccaagttaacctagatgaattagtagttatccaagatgatatggacttaacactaggcaagttgcgcttacggcaaaaaggttcagcgggaggccacaacggcattaagagtatcatcgcaagtgtccaaagctcagaatttaagcgtgttaaagttgggattcaacatccacaaaaaagtacagtcgttaactgggtcttaacgccgtttgacaaagacagcgcaccaattatcaatcaagcactagaccaggcatgcgaagcactagaagactggtgccaaaacgacgacttcatgaaaacgatgaataagtttaattagagtgtcgttggcagttggtcagattctgagcatttgcctaacttggcgaattgacgctgcaagcggcgatttgaaaagtgtagcaaagcgcaggaatctactgccaatgacacgtttcaaaaacagagtgcgtttggttgcggttagcaacagagcacgtttcttcgcgccattataataagaaagtaaaggaacttttacatggatttaatgacaatgctggggcagaccaaacaggtgcaatccgttttaaagaatcaacgaccagggattaaacaactacttacagggctttcgggatcagcgaaaaccctgtttttggcgacgatttataaacaacaacccttattgattattgagagtaatacgttccaagccaatcaagttgctgatgatttgagtaatttactcaatagtgatcagatttacactttcccagttgaagaagtgatggcggctgaaatggcagttagttcacctgagtccagagcggaacgtgtgcgaacgttgagttttttagcaacaggcaaaaaaggaattgtgattacatcggtcgcgggcatgcggcggttattacctacagcgcgtcagtggcaagatagtcaactcacaatcaataccgatagtgaagttgatccccaggcacttgctgcgcaacttggtgaaatgggttatttccgagataagttggttggtaaacctggtgagttcgcaatgcggggggatattattgacatttttccactggatgcggaaaatccggtccggattgaactctttgatactgaagtggattcactgcgttcttttgaagcagatacgcaacggagtattgagaatttagatagtgttcaaattatgccggcgactgacttattggccaacacagcacaattggaaatggctggtgaggcattacaagcagcttatgaggcggttgcggccaaaataacggataaaactgaacaaaaacaattggcgacaaactttgaaacaccgattgaacggttgttggccggtgaacgcgttgagaatttagcgttgtttgttgattatctgtatccagatcaatcaagtctgattgattactttaaaaagagtggcttagtgatttttgatgactatccgcgcattttagaaacgcagcggattttgactgaagaagcggccaactggcaaaccgatatgttggaaacccaccgcatgttgccagaccaacgactcatgatggatgcccaagcgctcatcaaaaaagatacacatgcgcatctctatctatcactgttccaaaagggaatggggaagttaaaactcgatgcactcaacaatttacccacgcggacggtgcaacaattctttagccaaatgccgcttttgaaaaccgagattgcgcattggcaaaagcaaaaacaaacggtcattgtgctcgtgtctgatcctaaacgggtcaagaagattgatcagacgttccacgactttgaaattgatgccgtcatcgccaataagactcagttggagacggggcggacacaaatcattcaagggtcacttcaaaatggctttgaattaccggatttaaaactggtggtcttaactgaaaaggaactgttcaatacggcgccgaagaaaaaagtccggcggcaaaccttggccaatgcagaacggttaaagagttataacgaattaaaaccaggtgattatgtggtccacgtcaatcatgggattggcgaatacgtcggcatggaaaccttggaagtcgatggggttcatcaagactacatcaccatcttgtatcgggataatgggaagttatttatcccagtcactcaactcaatatggtgcaaaaatacgtctctgccgaggccaaaacaccgaagattaataagcttggcggtggcgagtggcaaaagactaagagtaaagtttcggcaaagattgaagatatcgccgatgatttaatcgaactttatgcgcaacgggaggctgaaaagggatttgcctttccaaaagatgatcaattacaggctgaatttgaaggccagttcccctatcctgaaacagatgatcaattacgcagtaccgctgaaatcaagcatgatatggaacgcgtccgtccaatggatcgattattagtcggcgacgttggctttgggaaaacggaagtcgctttgcgggcggcttttaaggctgttgaagccggtaaacaggtggcctttttagtgccaacaacgattctggcgcaacaacattatgaaaacatgctgacacgcttcgcggattttgcggtcgaaattggtttactgtcacggtttaaaacgcgcaaagaagtgacggcaacgctcaaaggcttagcagagggcaaagtcgacatcgtgattggcacccaccgcttgttatcgcaagacatcaagtttaaagatcttggcttgttgattgtcgatgaagagcaacgctttggtgtaaaacacaaagaacgacttaagcagttgaaggcacaagttgacgtgttaacgttgacggcaacgccgattccacggacgttacacatgtcgatgctcggtgtgcgtgatttatctgtgattgaaacgccaccgactaaccgctatcctatccaaacgtatgtcatggaacaaaatgccggtgcgatgcgcgaagcgattgaacgggaattagaacggaatggtcaagtgttttacctccataatcgagtgagtgacattgaacgcacggtcgatgagattcaagcgctggttcctgaagcaacggttgggttcgcacatggtcagatgaccgaggcacaactagaaggtgtcatctacgactttgtccaaggtaaatacgacgtcttggtgacaaccacgattattgaaaccggggttgacatgcctaacgtcaatacgatgattgttgaagatgctgatcattacggtctttcacagctctatcaattacgcggccggattggacgtagtagccggattgcttacggttactttatgtataaacccgataaggttttaacggaagttagtgagaaacgacttcaggccatcaaggactttaccgaattagggtccgggtttaaaattgcgatgcgtgatttatcgattcggggagctggtaatttattaggtaagcaacaacatggttttatcgattctgttgggtttgacctatactcgcaaatgttgggtgaggccgtcgctaagaaacaagggaagcaagtcgttgctaaaacgaatgccgaaattgatcttaaactagaagcttacttaccagacgcgtatattaatgatcaacgccaaaaaattgaaatttataaacggattcgccagatggattcagaagcggcctttgatgaaattcaggccgatttaattgaccggttcggtgattatccagatcaagtcgctaatttattagcgattggtcagttgaagatgaatgcagatgacgcgttaatcgaaaccatcaaacaaacgaaagaaatcattcaagtcaccttatcggcgaagggcagtcgccttgtttcaggtgaacaaatttttgaagcgttatcgacaacccgcttgaaagcaacggtcgggtttgaacaagaacaattaagcgtgaaactcgtaatccagccgaagatgcaaccggcagattggttgagtgaagtggcaacttttgttacaagtctcttgaagatagaacaaaagcacacggaacaaccaacggattaggcacgctaagtggaggccaggcatgcaaaataaacagatgcaacatctgatgaaaggcgcggtcattttatcaattgcgtcgtttatcgcgaaggtattaagtgccgtttatcggattccatttcaaaatatggtcggtaacaccggcttttacgtgtatcaacaagtctatccaatctatggcattggcatgacgtttgcacttagtggctttccagtttatatttcgaaactggttgctgaacaagtcaatccggaggaacaaacgcagctgttaagacgctcatttgcactgttaggcatctttggtgctgcaatcttcatttatttacagtatcaagcgccgaaaattgcgggggcgatggcggatccagcattaacaccgctgattgaaatggtatcgtttatgtttttattgatgccgtttctagcggtgacgcgggggtacttccaaggaattttcaatatggtaccgacggcggtttcacaagttgctgagcaactcgtgcgggtcgtggtcatcttggcggcagcgtggctatctttgaaactgcactggtcagtgtatgaaatgggcacatgggcgatgtcaggcgccttctttggcggcttggttgcaacctatattttattacggccagcagaaaccgcctttcaactcaaggcgccacaccgtggtggcatcgattttaaggcgtatcaacaattggcaaaacgcttagcgattgaaggcgggtcaatttgcctctttgcttcattaattgtgttattacagctggttgattccttcacagttaaaaaagggttggtcctcagtggattatcggaagaacttgctaagaatatgaaggggatttttgaccgtgggcaaccacttgtccagctgggattagtcgtgtcacttgccttctcatcaacgttgattccgagtctgtcacaagcgcggcaacggcggcaacaatatcaatttcaacaagttgctgaagcgctgattcatatcagtttaggtttatcggcagcagcaaccaccggcctaatggttttgatgccgcagattaattatttcttattcggggatgctgatggtaatcaggcattggtttggtatatgttgagtatcgcaatcatcgcgctgatcaatgcttgcaactcggtgctccaaagtcttgatcagttccataaaacaacggcagccttaattgttgggttaatcgttaaagtagcaatcaatcaatggcttgtgcaacactatcaaattgttggcgcgagtgtcgggactgttatcagcctcggtgttgtgttagccttaattttacggcaatcaccagtgattgtacgtcaagcgcttggtttgcaacgctttaccggtaagttacttgcgatttgtgcagtgatgtggctgggtgttaagattgcgctacagtttgcaccacaatcacttagttccagaggacatgcgattttagggacgggccttggcgtactcgttggtgtgctcctatttggcggattagcattacggtggcagttattctcgattcgagaatggctgacgatgccaggtggccggcaactattgcgcctttcgaaaaaaataaaaggtaggacaaaataatgcgcttagataaatttttgaaagtatcacgaatcattaaacgacgttcagttgcgaaagaaattgcagacaagggtcgaatcatgattaatgatcgccctgcaaaatcttcaagcaatgtcatcgtgggtgataaactggaaatcggatttggtaataaaacgatggtcgtacgcatcacacagatcatcgaaactacgaagaaaagcgatgcagctgaaatgtatgaaattttggaaacaagacaagctgaaaactttgattaaggaaaaagcgctggccgaattaatatgggccggtgcttttttttgtgactttgttgagcatcttaataaaagtcattaagaatctgggatcttagttgacgacctttttgtgaaattgctataatgaacttagttccgagatggggggcttctaagtgagtcgaaaaattgcgaaaatcgagaatgcatttacccagcaacaagcagcccagaaaatcgtgcaagacaaggcagcccatgttaagcgtgttcataaacgccgcttatgtggcttggggattgttgcagtattagtcgtcttaatttgtggtgtgcagattttccaaacccatcattcattggccgagattagagaaacaacggcagctaaagaaaagacattaaaaaaagctaaagcaactgagtctgatttaaagattcaagtgcaacagctgcatgataatgattacttggccaaatacattcggtacaagtattactattctaaagacggtgaaaccatcttcagtttgccccaggacaaggcgcctaatttaaattagcaacaaaaataattcagaatacgaccttgtttcaagggcaaagcgtgctatacttattttattaaatatcacgcttaagtgattaaaagtttgacgagttcaaacgaccatttaggaggacgtagttttatatggcagttgaagttggttcaaaagttgctggtaaagtaacgggcattacgaattttggtgcttttgtagatttaggtgaaggcaaaaccgggttggtacatattagtgaagtgtccgatagttatatcaaagatattcatgatgttttaaccgttggtgatgaagtcacggtgaaggttatgtcagatcaaaacggtaagattggtttatcaatccgcaaagccgttgatcaacctaaagtgcaagaacatccgcgccctcaaagtcgtccaaataataatcgcggtggatatcgcaaaccagagcattcaagcgcacctaaaaaagaaggctttgatgatttattatcagggttcttaaaagatagtgaagatcgcttatcaacgattaaacggaatacagaaggtaaacgtggtggccgtggcggccgtcgcagttaatagaacaaattgataaaggttggcttgaaagtttggtgatagactttcggggcaacctttatttcatttcaagtctgtgttggagaggaatcggtatgttagaacaagcatttcaaacacatcttcaaaaagagcagttctggcaagccggcgacaaggttgtggtggcaacgtcaacgggagtcgattcaatggttttattgtggttattgactcatctgccccaaaaacaacgaccccaagtcgttgtggctcacgttaatcatgaattgcgtgcgcaaagtacggctgaagaaaaatatttaacccagttttgccgattgcatgccatcccgttacgcattcaacattggccaaaagcgagtcatcctgaaacaggggttgaagcggcggcacgtcaatttcgctatgctttttttgatcaagtcatgcgaaccgaatcggcgcattacttggtgaccgcgcatcacggcgacgatcaactagaaaccttgctcatgaaattagttcgtagcggtgaattgcatgaaatgcgggggattcggcaagtcagaccgtttaaaacggggacgttaattcgcccgctattaccttttagtaagcaacaactgcgtgattacgctgatcagattggtttgaggtattacgaagatcaaaccaatcaggaacaaactgttcttcgtaatcggatgcgacatgcggtggtgccacttttaaaacgagaaaatccacacttgattcaaaatgccaatcggttcagtcaaagtctgacccaaatggtggcacaccaagatgatctaaccgcggcgttactgccattgttggcaatcaaaaaacagccggcggcaattgaagggcgtttagaccaactcgatggcttgaaccagacacaacaaagggcgctctggcaattggtgtggcaacgatatttcaagactttaccggcgttaaaggcagcccagttaatgcaagtgcaacaattgttggcgaacccgcagaaaccgcaaggccaagtggcattgaacaatggcatcatttttgaaaagcagtatcggtgttttcggattggtgtccaccaaatagtggattctttggtcaaaacacgaacattagcgattaatgaatggctgcggttaaaaaatggcgaacaagttggtgttttcgatatcgaccatctacctaatcaagttcaacggcaacaggtcgtttggttagcaccagaggaatggccactgcaactcagggcgctacaagcaacagatcgaataatgcttgataaggcacaccacaaaaccattcaacggttatggattgatactaaaaccccacaggcaaagcgccaaaatgcatgggcggtttggaccccaaatcaattgcttggccggccggatttacggatttcggcgttgtttaatcgcgaacaaactggtaaaatacggtacatactatgttatttagatgattaagcaaattacggaggctggcacaatgttagaaaaagatattgaacgcgtattatattcaagagaagacattcaaaaggttaatcagcgcttaggaaaacaaattacagcggattatcaaggtaaaaacccgttattaattggtattttaaagggtgcgatcgtcttcatgacagatttgattcgcgaaattgacctccatgttgaaatcgactttatggatgtgtcaagttatggtgctgagaccatctcgtcaggtgaagttaaaatcatcaaagatttagatacgagtgttaaaggccgcgacattatcattatcgaagatattgtagatactgggcgcacgttgaattacttaatggcaattcttaaaacacgtcaagcaaactcaattaaagtctgcacgttaatggacaaaccaagccgtcgaattgtgccagttcattcggattatgttgggatggaagtcccaaatgaattcgttgtggggtacggattggactatgccgaacgatacagaaatatgggaacaattggcgttttgaaacctgaaatttattcgggtaaataaatggtcaataaaagtcagatatgttatagtttaacagtgtcaaaaggacactgtgtcacaaatgatgagaagcttcaggaggtcacgtatgaacaacaaaaagaatggactgtttagtaatagtctgttttacattattatcttagtggctttagtcggtgtgttctcgttcttcatgaacggtaacgctggatcagagtctaaggaagttcaatcaagtacatttttaagtgaattgaagaccaataaggtcaagtcattctcaattcaaccaacgaatggtatttataaaatttctggagaatatcgtaaagcacaaaaaacagaacagcctaaaaagaatcttttaggacaaaaaacaaaagcaagatcagttaaacacttcacaacaaccttattacaaagtgattcacaagttggggcaatgaccaagttagctgacaaatcagcaaccaaggttgaaacccttcaagaaccacaatctggttggtgggtaagtattttaagtcttgtattgccattgatcatcatgtttggtttattctacatgatgatgggccaagcgggtcaaggtggcggtcaaggcggtcggatgatgaactttggtaagtccaaagctcaaaaagccgacaagaaagctaataaagtacgtttctctgatgtcgctggtgcggaagaagaaaaacaagaattagtcgaagttgttgaattcttaaaagatccacggaagtttgctgcattaggggctagaattccagcgggtgttcttttagaaggacctccaggtactggtaaaaccctattagctaaagccgttgccggagaagcaggtgtgccattcttctcaatctctggttctgacttcgttgaaatgtttgtcggtgtcggtgcaagccgtgtccgtgatttattcgaacaagccaaaaaagcagccccatcaattatctttattgatgaaattgatgctgttggtcgccaacgtggtgccggcatgggcggtggtcacgatgaacgtgaacaaacattgaaccaaatgttagttgaaatggatgggtttacggggaacgaaggcgtcatcgtcatcgctgctactaaccgttcagatgtcttagatccagcgcttttacgtccaggtcgttttgaccggaagatcctagttggtcgtccagatgttaagggccgtgaagccatcttgaaagtccatgctaagaacaaacctttagccgatgatgttgatttgaaagaaattgcgcaacaaaccccagggttcgttggtgctgatcttgaaaacttattgaacgaagctgctctagtagccgctcgtcgtagcaagaccgatatcgatgcttctgatgttgatgaagctgaagatcgtgtgattgcgggtcctgctaagcgggatcgcgtgattaatcctaaagaacgtgaaaccgtggcttaccacgaagctggtcatgcgatcattggtttagttcttagtgattctcgtgttgttcggaaggtaacaattgtccctcgtggccgtgctggcggatatgccatcatgttaccgaagaatgatcagttcttaatgagtaagaaagaattaacagaacaaattgttgggttacttggtggtcggacagctgaagaaattattttcaactctcaatcaactggtgcttctaacgatttcgaacaagcaacggatattgcccgcgggatggttactcaatatgggatgactgataagctcgggacagtggcccttgaaaaagaaggtcaaccattcgttggggcagcttacggtcaaggcccagccttctccgaaacaactgcggctgcaattgatagtgaaattcgtcggattattgacgaagcacatcaacaagcacacgaaattattgaagcgcaccgtgaacaacataagttaattgcggaaatgctcttgaagtacgaaacattaaacgaaaaagaaatcttgagcttgttcaatgatggtaagatgccagaaaagaacgctgaagaattcccaagcgaaaaagcagctacttttgaagaagctaagaaggcgcttgaagcaaaagaagccgcaaaagaagattcagaaaaagaaactgataaaaaggatgtgacaatcacacctgatgaagatgatcaatcgacaccagctgaggataatcaacatccagacgatgaagcataaattgttacaccaaaaaggtcgacacgattagtggtcgacctttttgcatcaatccataaaagaggttatttagatgacagattatttaattaaacaaatttcagaagatggccaacttcgtgcttatgcagtgaacgcaactgatgttgtaacggatgcgcaagaaaaacatgacacatggtcaacttcatcagcagcgtttgggcggacgattgtcggcacccttttattgagtgccgctggcttaaaaggtgatacgaagatgacagtcagagttgaaggtgacggcccagtcgggaagattgttgtcgatgggaatgcgcaaggcacagttaaagggtatgtgacgaatccacacgttaacctaccattgaacgacaaaaataaaattgacgttaaaggtggcgttgggacaactggtacgttgagtgtcacgaaagatcttggcttaaaagaaccgtttaccggtcaagtaccattggtatcaggagaattaggtgaagactttacttactaccttgctaaatcagaacaaacaccatctgcagttggcgtttcagtcttcgttaatgaagataactcaattggtgtcgctgggggcttcatgattcaaattctcccaggggcggatgaccggttaatcgatatcttagaagcgcggctgaaagaaatgccgctggtgtctgaattactccaacaagggatgagcccagaggaaattatcactgaaattgtgggcgaactcccaatgaagacgttagaaaaaatacctgttaaatacgaatgtgattgttcaaaggatcggtttgcaaaggcactcagttctgttgcgccagcggatttacaacaattaatcgatgaagaccacggtgctgaagcggtttgtcgtttctgtggcaagcaatatcaatttacagaagcagaactaaaggcaattttagccgcgcaatagaatagtcgcaaatttttgcctgaatactatttttttgctatgataatttggatattgtcggaagacacgaagggaatgggttggcattatgacatggcaaataggagacgtgacgattccaaatcaagtagtcgtcgcaccaatggctggtattacaaacgcagcatttcgcgtaactgcaaaggaatttggcgcaggtttagtggtctgtgaaatgatcagtgatcgcggaattatgcacaataatcaaaagacaatggggatgatgtttgttgatccgaacgaacatccagttagcatccaaatttttggtggttcaaaagacaccttagtggaagccgctaaatttgtggatcaacatacacaagctgatattattgatatcaacatgggttgtccagtgaataaagtcgttaagacagatgctggcgcgcgttggttattagatccaaataaggtttatgaaatggtctcatacgtgacagacgccgtgaagaagccagtaacggttaagatgcggacaggctgggatgaagatcatattttcgctgttgaaaatgcacttgctgccgaacgtgctggtgcttcagcacttgcaatgcacggtcggacacggaaacaaatgtacaccgggcaagcagactgggacattttaaaacaggttaaatctgaattaacgattccatttatgggtaacggtgatgtccggacaccacaagatgctaaacgtatgctagacgaagtgggtgctgatgctgtcatgattggccgggctgcgctcggtaatccatggattttaagccaagtggaaacctacttacgaacaggtgaattgattgctgaaccaaccccatgggaaaaaattgcaacggccaagttacaattacaccgtttagtcgaacttaaaggtgaaaatgtggcttgtcgtgaattcagacaacaagctgcctattacttgaaagggattcctcgtgcggctaagaccaaagcggcggttaacgaagtggaaacggaacaagccgttggcgatattttagaccgctttgtagaagaaaccgaagcgagaatggcaaattaggttccttatgttggtgttttcgtgttaaaatcaacattagtagataattgaatgtatggaggaattgtcagttgggacaaaaagataatcaaagagaaatgaacgaccaactaaaggtccggcgtgaaaaattacaactgttaaaagacgaaggaattgatccttttggtagtcgttttgatagaacacatatggctgcggaattacacagtgaattcgaagcaattgaaaaagacgatttagatgctaagaatctagaagtcacaattgcaggacggatgatgtctaaacgggggaaagggaaagttggctttgctgacatccgtgaccgttcaggtaaaatccaaatttacgtgcgtaaagatgaagttggcgaagaaaactatttaattttcaaaaaggctgacttaggtgatcatttagggattactgggcaaattatgaagactgacatgggtgagttaactgttaaagcaacgcacctgactttcctatcaaaagcattacgaccattgccagataagttccatggtttaaccaacgtggaacaaatctatcgtcaacgttacttagatttaatcgcaaatccagagagcttggatcggttcacgaaacgcagcaagattatttctgctgtccgtgaatatttagataacaatggctttactgaagttgaaacacctgtcttgcatggtcaagctggtggtgcatcagcacggccatttattactcatcacaatgcgctagacatcaacttgtacttgcggattgcgcttgaacttcatttgaaacgattaatcgttggtgggatggaacgtgtctatgaaattggccgcgtattccggaatgaagggattgatacgaaacacaatcctgaatttacgatgctagaaacatatgctgcatactttgattataaagacgttatggatgaaacagaaggtatcatccgatttgcagcgcacaaggttttaggaactggtcagatttcatatcaaggacaagcgattgatcttgatggtgattttggacgggttcacatggtcgatgcaattaaggaaaagacgggtgtcgatttctggcaaccaatgacggttgaagcagcgcgtgaattagctgatcaacaccacgtgaagtatgaatcatactggcaagtggggcacatcattaatgcgttctttgaagaattcgtggaagatacattggtacaaccaaccttcatctatggtcatccagttgaaatctcaccattggctaagaagaatgctgaagatgatcgtttcacagaccgttgggaattatttatgcacggtaacgaatatgcaaatgcctttactgaattaaacgaccctatcgatcaacgtgaacgttttgaagcacaagctaaagaacgtgaaaatgggaacgatgaagccgaaggaatcgatgaagattacatcgaagcattggaatacggaatgccaccgactggcggacttggaattgggattgatcgactagtcatgttactgacagatgccgcatcaattcgggatgtcttattattcccaacaatgcgtccagacaacaataataacgattaagattaaactaaagcccgcaagcagacgatttgcttgcgggctttttttattgaaaaaaattgggattataaaaagtttttttagtgtattttgtgggtgaataagcatcaactttcggtatattatgttgtttgcgcgagttgttcgtttaatagttcatttatttgcataaattgcggatactagcgactgtttagattatgaaagttcataaataacagttgagattaatagttgacgaaaggctgtagagctgatatagtagtctatgttgtcagcgagataaaacatttttgctaacgagtcaggtaattaaatcagtttgaatatttattcaaaaagtatttaaaaatgcttgacagtgttcgttagaaatgatatattaattaagctgtttcaacacagtagatctttgaaaactgaacaaagtttcgacaaaccaaatgtgtagggtcgcccttcggggcacggattaacaactacgactcattcgaatcaaaagaaagtctctggttatatttatcgcgtcggtaacgattatttagtgctaaactctgtaaaagggttcatcaaggatgccactgctatgaaacactatcttgaaggtggcaaagaacaaactacaaatacgtattttgaccagccaaatgtgtttgcaatcgctaaagatcaagtaggtaagcatgctaagctgtttaaacttgcgtacggcacgatcacttacgaagagcttcctgaaaatgatcgcgcgtatgtctctttcgctatcattacagacaagaatattgatgaattacccaaaatcaagattgatcaaatcgactaccaagtaatttaaactaaaatagcgcgtctcactatcttacaagtgcggcgcgctattttattctagtcacgccgttgatacgccatgactgtcagtggcataaacaccagaataatcacagcgccactgacgaggaccattgttgcggttccgctccaatgaccggtgttcaaaattcctctgattgccgtaatggttgtggtgacaggattaatgcggacaatggtttgtagaaaatgcggtaaggttttaactggaataaaggcgttcgataagaaggtcaataccagaatgatgatcatcgataaactactaatcagttcggcatttttaaccagtaaaccgactaaggcgaaaatccacgacgttgaccagccaataaagacagctaggaataacgccatcatgagtgcgccaaaattagcggtagggcgccagcccattagtgccgcggtgaccattgccatcccaccggaaagcaacaatcgtaagctatcaccaactaattgaccggcaagcggggcgattggcgcaattggtaggtcttaaaacggtcgaagattccctgattgatatcttctcgtaattgttgaccggaacctgaagcggcgtttaagatactctgtactaaaatcccagaaaccaacatcggtaaataggcgtggacgctgccggcaatgacaccaccgaataaatagccaaataacagcgtgaaaataattggctgcaccagcacatcactgacattatcaggattatgcaaggtcttcagtaaattccgatgggttaacgttaagctattgcgcaacacttgcgtatttgttttcatttgtagcatgttattatctccttagtttttaccaacggtcattttcaaaaagacgtcatctaacgatggggctgtcaattgtaaatcgctgatggtgatgcctgccagctgacattgatttaaaatcgcggtgatgacgcccatatcatcgtgcactaacggtccaatgattgtttgatccgtcacacgcacgggctgttgcaaaacggtctcgcaaatcgtctggacctgcgcaacttgttgttgattggcaaccgtcaactgctgaccaccgacttgcgctttcagctcactaggtgtcccactggcaatcaattggccatgatcaatcagcgcaatccgatccgcatattgatcggcctcctctaagtactgtgttgtcaaaaagactgtcgagccatccgcgactaatttttgaatcacatgccacatttgcgtccgggttcttggatccagaccagtggtaggttcatcgagaaagaggatccttggcttgccaactaagctgaccgctaagtccaaccgtcgccgcatcccacctgaaaaagtcgccaatgtttgatccgctgattggtccaaatcaaagtccgtcagtaactcgttagctcgggttcgactcgctttggcactgagcccatttaaccgcccaaataagcggagattctcgcgcgcacttaagtcttgatcgattgccgctgtttgattggtgacactaaactgttggcgcacttggcggctttgtgttatcgtatcaaagccatttaatgtgattgtgccactatctggtcgtaggagggtggtcatcatttttaagagcgttgttttcccggcaccattgggccctaataatgcgaaaatctcacctttagaaacggctagcgaaacggaacgcaccacttttttggtcccaaatgctttttgaatattgtttacttcaatgacatgctcactgcacataatattgcctcctcatttaataatcaggtcacctgattaatttatatagtaaggtcacctgattaaaatgtcaaggattgctactcttagattttggaatggtgtatactaattaaaacagcgaagggaagatgacgtatggcaaagagtgtcaaggccgaattggtcgccggaaaattagctgaatatgaacaactcagtaagatctacgatgatatcgttaaacaagcacgcccgcatttaatcgtcgaaggccaggggaagattctattggcacttgctgatgaagatcacttatcgcaacgtgaactagcaacgcgtttgggaatgtcacctcaatcaaccagtgaatttgtcgctaaactcgctaaacgcgagctggtgacgttaagtaagctcccaagtgatcgccgggttaatttagttaacttaacggatgccggtcgtcaagaaattgaaactgccaatcaagaggtgccaccgtttgtgaacgccttgaccgaggcagaactcgaccagttagtgccactactcaacaagattacaacggcgatgtatgccgatatcgatgcctcaaatccgacgttgggcgttaagtttcataaattattggccggacgatatctgaaacaatttaaaaaataaccaaaaaaatagcgcgtctcacttaaattagtggggcgcgctattgcatttaattaatcaaagtcgtaatcactatcttccatcgcttccacattccctaagcgataaccattcccaacttgggagaagaaatcgtggttggcagttgaagtcgacatcccattcaagatcacggggttcacatcttcagcgctatctgggaagagggcgccttggccgaggttcattaaggctttgttggcgttataacggaggtaagttaatacttcttctgtccaaccagtgccatcataaacttcgtgggtgtatttttcttcgttggcatataagtcgtacagtaaatcatacatccagttttgcaattcttcttgttctgacttatccaattcattgaaggctaattggaacttatagccgatgtaagtcccatggactgactcatcacggataatcaatttaatgatttcagcaacgttggccaacttattgttccctaagtaatagagtggggtatagaaaccagaatagaagaggaaggtttctaaaaagacgctggcaattttttgttgcaatggtgtgccgttttgatagatatcgttaatcttgttggctttgtattgcaagaattcattcgtgttggtccagtcgaagatttcatcaatttcagttggtgtgtttaacgttgaaaaaatggatgaataactcttcgcatgcacggattccatgaattgaatgttgtttaaaacggcttcttcatgttgagtgcggatattggcttttaagctggccatcccatcttgtgattgtagcgtatcaagtagggttaaaccgccaaagacatgcccgacgatccatttttcattgtctggtaaactgcgccagtcatctaagtcattggaaaggggaatccgcgtatctaaccaaaattgttcggttaatttttcccaggttgctttatcaatttgatcttcaacttggttccagttaattgcaatataattttctgccatgttcatgaactccttttaacgtgcttcttttttaggtatgtaggccagctgacgagcagctggagtggagatttggtgcttgttttgaaacgtgctttttgaaactgacttctgcgcttagttacactcgtcaaacaactgcttatagcagttattcgccgagttagactaatgctcaaagtcaaaccgtttcaaacgcactctagattacacaactttcgcatgcgtttgcgccgacttcactttcgtcgtctgtgtaagtccggatgtagtagattgatttaatccctttgtggtgggcgtagtttcttaagatgtttaagtcccgggtggtcattttgtcagtccggccgtttttccattcgtaaaggcctgctggaatcgttgaacgcatgaagagtgtcatactcatcccttggtcgacatgtttttgtgctgctgcgtagatgtcgatgactttacgcatgtcaatgtcataagctgattcataatatggcatggtatcgtttgaaagacctggggcagggtagtagattgtcccaattttcttttcttgccgatcttcaatccggttaacaatcggttgtaagctagcagaagtatcattgatgtatgaaattgaaccgtttggtgcaacggctaagcggttttgatggtataaaccgtcttgcatgatggctagttttaaagcttcccaatcggcttttgtgggaatcataatgtccttgaaaatcgctttgactttgtccgtcttaggggcccagtcttcagtgaggtattgatcgaagtaactaccatcagcatacttactcttttcaaagttggcaaaggtcatctgacgttccttagcaatcttatttgaagcaacaagtgtccagtagtttaaaagcatgaaataattactggtaaagtcgattgattcttctgacccatacatcatgtggttcttggcaaagaaggtatgcagacccatgccacctaaaccaatggtgtgggccaattcgttcccatgagccacagaagggaccacatcaatatcagaatgatctgtgacgtaggttaaagcacgcaccatggcttcgatagaaccaccaaagtcaggtgacgtcatcatgttcggaatattcgttgaacccaggttacaactgatatccgtccctaacacgtcatattcttggcggttattaatttgtgacggggtttgcacttggaggacttcagaacagaggttactcatgatgatcttcccatcaattgggttcgcagcattggctgtgtccacattgacgatgtaaggataacctgattcttgttgcaatttactaatttcattttctaaatcacgggctttaattttggttttcttgatgttatcgttggcgattaagttgtcatattctttggtgatgtcaacatatgagaaaggtacgccgtattctttttcaacaccgtaagggctgaataaatacatatcagcatcagctttcaccaattcatagaacttgtcggggacgactaagcctaatgagagggtctttaaacgatatttttcgtctgcattttcttttttagcacctaagaaagcaatcacatctggatggaaggcgtttaaataaaccacgccggcgccttgccgttgacctaattggtttgagtatgagaaagaatcctccaataacttcatgacagggaggacaccacttgctgcaccgtcgatgcctttgattggatcgccagctccacggaggttcgacaagctaatcccaaccccgccaccaatccgtgataattcaagtgccgagttaatcgtccgaccaattgaattcatatcatcggttgtttggagtaagaaacatgaaactaattcaccacgccgtgaacgcccagcattcaaaaacgatggtgttgccggttgataacgttggtggatcatttcatccgctagttgcagcgcaagggtttgatcaccatctgcgaagtagagagcattcacaaaaacgcgatctttaaaatcttcaagataaaagccattgtcgtttgtttttaatgcgtattgcgcatagaacttataagcagccataaatgacttgaagtggaagtcttggtcctttaaatattgattcaattcttccatgaatgaaagagaataagccttcaaaaaatctgcttcataataattttccgcgactaaataatctagacgatcttgaagtgatttaaacgtcaccatattgggttgtacgttttgttccaaaaaggcatcgagtgcttcttgatccttttgtaatggaatttgaccattcactggaatattaatttggttattcaattcatagtatgttacatcttcggttttaatctcttttaaagacatccttgccaccactttctagtcatattagctgttttagggtttaaaaaaagtgaagaccaactctttagtaatcaagagtcggcctcacccgttaaaactgggaatgcatggtgcttaaatcgccaatttttgcaattccgctggtctaaaacctgagaagctttctaggccatccgcttctaaaacgggaacggcttggaaaccttgttccttcaagtaatcaatatattgtggttcgtcattgatgttatgttcaacaaaaggaacgttgtgcgtttctaaaaagtgtttcgtcatccggcattgtgggcagccgttcttagtatataatgtgatatttgccataatcgttaactcccttgtatttctcttatcgataaaaatagtataccgttttgaaatggaagatgcaatcaataaacaccacatattgtagataaaacaaaaaacgaccactaattatagtggtcgtttacgaatgttcatttgattgtcttgggcaacgtcctgtacttaagttaaacatatttatgggtaaagtcaatccctgctaatgcgcaaaatttttcaaaagcacgccggacaaagcttaacagattttaaaaaattttttagattgggattaatttaatattgcaccatcataaaaatgagttaacgaacattttataaaattggtgaaagtaaccgtgaaaatttttgtttaaatttcaaccaagttgactgttgggcgattatttcgtctgttagtagggatgctttttccatatcagcctgatagatcgcttcaagttgcgctgcaactttcggatcgtaaataaacgtattggcttcaaagttcagcttgaaactacggatatccatattggcagaacctacagtgctgatatgcccatccatgaccgccgtcttagcatgtaagaatccatcttcataccggtaaatcttaacgccagctgcatgcaagagttgactgtagtattctgttgcacggtagatgaaggggtgatccggcatgttaggcgtcatgatacgaacatccaccccggacattgccgcagtcgtcaacgcatcaataatactatcatccggaactagatagggcgtttgaatccataaacgcttcttagcggtactaatcatcttcagataaccgagtttgatttgttcatctaatttatcgggaccacttgagacaatttgcatggctgctgatccacgattttgggattggtccactgggaagagttcttccgagtaagttaacttaatcgcaggctcaacgctcgcgttccagtccatcataaagcgtacttgtaaggctaacacggcattgccggtaatccgcatatgggtatcacgccaatgtccgaatttcttactccggcctagatattgatcaccaacgttaaagccaccaatataaccaatcttaccgtcaattaccacaatcttacggtgatcacggaagttcaagcgaaaatcggtaatcgtgtgttttgaactgaagaacgttcgcgcgtggccaccgacatcttcaagtgcgcgccaccatttttgcgttgcgccttgggagccccaagcatcgtagacaacgttgactgaaacgccttctttggctttttgaatcaatagttgttgtaactcattgcccaatcggtcattatagatcgtataatattcgatatgaatacttttttgagcttgtttgatgtcggcaaagagggcgtcaaattttgcttgcccgtcagtatagattttgacatggttattctttaaaacgggtgcattattaatatttaaaaagagattcaccatttcggatgcttcactggaaagcatctttttcggtaagaggtcgtttttacgattttccttacgttgaatgtcgaccaatgcggaaagcccatcatcgatttgcgattgactttggaaaatctttttccgcgataagccccgtccggtaaacatatataggataaaaccgcccacgggtagtaaaattaagactagcagccacgcccaggtggccgcaatatcgcggggctgtctcaaaattgtaataattgccaataaggcattaatgaagatgatgaatgacattatttctgtaactaaaaccatatcgtactcctccaaaattctagcgttgcttattattttactaaaatcacgctcaaagcgctagttaagcctatcaacagtcagttaaatgaggtaatccctgttgggccagatggtgcgccccctgattctgacgctctggaatccattggtggatgaccattgaataaggcgcctcaagtgctagaatccggtcgacggcagcttgataatgtttagcataccgcttttctaggctctgaaagacaagcttgctgtcaacgttaatctgtagtattttcgtggtaagcccccgattggctagttgttctaagccaagaatgaccgccgcaaattctgcatcatgattggactgttctggcaaaggtgcttgtagttgatattgtcgctctggtgtcacgattaaaattcccgccgcacttggtccgggattgccacgagttgctgcgtccgtataaagtttaatcattcttaaaatttaccgcctttcactgacagcagggtcaggttaatggtatgatacaaagcgtaaaaaggagtgttctcatgcaaaagacaaccaccgcattctaccaaccaaattatgcttacttcgtgacgatttggtcttggattggcttcgtctatacattagctttaattgtacaacttgaactcatcaacttaaactggcaatcgtggggcatcggcttaattgccgtttggttgacgctatgggtcattttcgggcatcgtgtttcaatgacggcagacgtgatcacgcttaaacggccggtatttaaatataatcgaaccatcaaccgtgaaacgactacgaccattattgtccaaaaacatggtttattaattaaaaccaacgaacttgattaccaacccgaacaaatactccttagtcgcaaagccaagcaggcattcgttgaacaactgaaacaaaatggttggccaattgaagaatagttaaataaaaaagagccacgacaaacattaatcttgtcgtggctcttttttagcgtttaaacgtatttttattctgctatcttttgcacgttagctgcctgcaaaccgcgggcgccttctttaatctcaaataataccggctcgtctttattcaatgatttatagccgtcggtttggattgcggtaaaatggacgaaaacctcctcgtcatctccataactgatgaagccataacctttagcattgctaaaccacttaacgattcctcgttccatcacaatccctccttgaaatgttaatcagcgtacgcgcttattttaccacgtacaaagaagtgtgtcgaagaatatcgttctttttaagcatcccatctgccaattccgtacgtaatcagctatactaggtagtatcataaataaaaaggagctgggcggtatgtcagatattcaaatagcacaggaaaatgaagctaaggagatgcagccaatcacggcaattgccgaacaagctggtttaacggccgctgatttagaacaatatggaccgtataaagcgaaggttaatttcgctgccattaatcgattgaaagaaaaagaagatggcaaactcatcttagtgacctcaatcaatcccacaccagctggagaaggtaaatcaaccgtgactgtcggtcttggcgacgcccttcgtcaactagatcaatcagccgtcattgctttacgtgaaccttcactaggccccgtcatggggatgaaaggtggcgcaactggtgggggctatgcccaagtggtaccaatggcagatattaacttacattttacaggggatatgcacgcattgaccgctgctgtgaatactttagccgccataatcgataaccatctgcaacagggaaatgccctcaacattgatccccgccgaattatttggaaacgggcgcttgatattaatgatcgtgcattacgccaagttgtcattggacttggtggtccagtgcaagggatgccgcgccaagatggttttgacattaccgttgctagcgaattaatggccattctctgcttagcaactgacattactgacttgaagcggcgcattagccaaatcgtcattggttacacttatgatcggcaacccgtcacagttggcgagctcgaaatcaccggtgcaatcgcgatgcttttaaaagatgccctcaaaccaaacctcgtccaaacgcttgaacatacaccagccttaattcacggtggaccatttgccaatatcgcccacggctgtaacagtattttagcaacccaaacggccctaaaaatgggtgatattgcgattactgaagctggcttcggcgctgacttaggtgctgaaaagttcctagacatcaaagtcccacaacttggcaagactcctgataccatcgtgattgttgccactgttcgggcgttaaaatacaacggtggtgttgctttagctgatctaaccactgaaaatctcggtgcgttagacaaagggtttagtaacttagccaaacatattgctaatatgcaacgttacggcattcccgtagtcgttgccatcaatgagtttacaagtgataccgaagcagaggttacaatgctccaagaaaaatgtgctgaactgggtgtcaaagccgttttagctagtgtttgggcacatggtggtaaaggtggccttgatttagcccaggccgtcttagaagcactcgatcaacctaaaaacttccaaccattatatgattcaaacgccgacattcaatcgaaactaaccacaattgtcactgacatctatggcggtaaagaggttgttttcgagggcaaagctatcaaccaactgaaagaaatcgaaaaaaatggctgggaccacttaccagtctgtatcgccaaaacacaatattcactctcagacgatccaaaagcattaggcgcaccaactgatttcaccgttcacgtccgtgaattgattccaaagcttggcgcaggcttcatcgtcgcaatgaccggcacagtcctcaccatgccaggtctaccaaagaaaccagccgccctcaacatggacgtcacagaagatggcctgattagcggattattctagagtgcgtttgaaacggttagcttctgagcattaatagaatttgacgaattgccgatacaatcggcgatttggcaaatttggttaagcgcagaaagttagcttgaaaagcacgttttccaatatcctaacgcccatctcgaaaactgattgacaagtcagccgattttaaggacaatggtagattgtatgaataggaggttcccatgctcatctatatcgttttagccgcagtcattgtactcggtgaccaacttttaaaaagctggattgttgcccatgttgcctttgcagcaacccaacccgttattccgaacgtactgagtttaacgtatgttcaaaacgatggggctgcgtggagtatcttggccggtcaacagtggtttttctacctcgtcaccattgtggccctcggggtaattggctacttattttatacctctgatcgcactgaaaaattttaccggatcggtttaacgttgctgttagccggaacacttggtaacttcatcgatcggctccaccttaagtacgtcgtagacatgttccaaatcgaatttattaatttccccatctttaacgttgcggatgttgccttaacagtaggcgtcatctgcgtctttattgctattttgttgaaagagaaagtgactcatgactgaaactaaacaattaacgattacaactgaaacaggccggattgataaggcgctcacccaattactacccgattactcacgttcacaaatccagcaatggttgaaaaaagacttggtgcaagtcaatgatcaaccttgtaagagtaaccgcaaagtcgtaacaggggatgtcgtcaccgtcaatattccagaccctgtcacgctcgacttaaccccagaagatattccgctcgatatcgtctatgaagacgatcaagtcctcgtagtcaataaaccacaagggatggtggttcatccatcagctggccacccgaatgggacattggtcaacgctttattggcgcacaccccattgtctgaaatcaacggcatcttccggccggggattgtccatcgaattgataaagatacctctggtcttttgatggtggctaaaaccaacgaagcccacgaatctttatccgcccaactcaaagctaaggaaaacttacgtgaatatatcgcgctagtccacggcaacatcgaagaagacgaggggaccattgatgcacccattggtcgttcaaaagtcgaccggatgaaacaagcaatcgtcgaagatggccgcccagcggtcacgcattttacggtcatggaacggtttgaagacttcacattaatcaaatgtcgactagaaactgggcgcacccatcaaattcgcgttcacttagcctatattaaccggccagttgctggcgatcccgtttatggtccccgcaaaactttagctgggcatggtcagttcttacatgctgctgtattaggctttaagcacccaacgacgggcgaaatgatgcgctttgaagccccattacccgcaatcttcgagaaaactttaaccgaattacgtgaaaatcattgacaaatcaaggattctccgttaagctaggtctaacttaatagaagcctttaaaatcggtcccgtgaggccgagaaggtacggtgaaagcaccactagacgcggagtctctaactgtaacctctcgaccttatcggtttgagaggttttttgtttggaaggagtctttacgatggtcaaagaagtggtcgacagtaacacaatgaaacgggtctttactcggattacgtacgaaattatcgaacagaataaggggatttcagatctcgtcctcgtcggcattaaaacccgtggcgtgtttattgcccaacggattgcagaacgcctcgaacaattagaaggcatcgcattgcccgtcggtacactagacattacgttataccgcgatgatcaacatgatcttgatacacaaaatgaaccacagattaacgggagcgatattcccgttgatatcacaaataagcatgtcatcttaatcgacgatgtgctttacacagggcggacgattcgggccgcgcttgacgccttaatggacttaggccggccaaagaaaatttcattggctgtcttagtcgatcgtggtcatcgtgaattaccaattcgccccgattttgtcggtaaaaatattccaaccgcgctcaacgaacaaattcgcgttgcgatggaagaaattgatcaacatgatgggattaccatcgaaaaactaactaaataacgactgaaccgtttaattgtctccagagagagcaaaagggtttgtcttgaacttagtgcgcctaaaaaaaggggcctaagtccgtcaagggacacacctaccaatctgttggagcgtgtgtctttttttggttcaaaaagtcgtcgacatggaggaaatacttatggctacacaatttagaaatcccgatgcggtcttagacgtcaacgaacgacccagcaccggtaaatggattggtttatccattcaacatatgtttgcaatgtttggctcaaccgtcctagtgccaatcttagtcggtttaaacccagggattgcgttattcagttccggggtcggcactttaatgtacctcttgattaccaaaggcaagattccagcatacatggggtcgagtttctcattcatcgtgccaatgctcgctttaatgaaaacgactggctatcctgggattgcacaagggacaatggcggttggggcagtctacttaatcgtttcaatcttagtcagtctgattggttccgactggatcgacaaagccttaccacccattgttgtcggcccaatcgtgatggtgattggcttatcactcgctggcacagctgccaaacaagccactatcaatgcccacgggaattacgacttaaaattcttcgcagtcgctttactaacgttgttaatcaccatcggctttaatatgtatctcaaaggattcatgagcttagtccccatcttgctcggcatcattgctggctacatcatcgccgtcttgttcgggatcgtcgattttcaacccgtgatggacgccccttggtttaaagtaccagacttccaagtcccatttgtcacttacaaacccggtctgtactggggcgcgattctcagcatggcaccaattgcctttgtcacaatgaccgaacacatgggccacattatggtcttaaacaaactcaccaagcgtaacttctttaaagatcctggtcttcaccgcacgttagccggggacgggacagcctcaatcatcgccgcttttgtcggaggaccgcccgtcacaagttatggtgaaaacatcggtgtcctcgccatcaccaaagtccacagtgtctgggtcttaggtggcgccgcattcttcgccatgatcttcggcttcatcggcaaactgagcgcgttgattcaaagcatccccacacccgtaattggtgggattagcttcttactcttcggggtcatcgcctcaagcggtttgcgcgtcttaatcgacaaacaagtcgattttgataagaaacgcaacttaatgattggttcatcaatcctcgtcatcgggattggcaatgcctacttacaattaggccaataccaattctcagggctagccatcgccaccgtccttgggattgtcttaaaccttgttttaccggataaagcaaagagcgaacttgaattggaggctcaacaaaatgcaaaagcataacgcgttggtttccgttgatcaactcaccaatgatttagtcgcaggtctcatcaaccgcgctagcgcctttaaaaagggcgcgacaagcaaattaactcggccggtctacgcaatgaacctattctttgaaaatagcacacggacccatacgagtttcgaaatggcagaacgcaaactcggcatgaccgtcttagacttcaatgccgatacgagttcgacttccaaaggcgagaccctcagcgatacgctcaaaacggtacaagccattggcgtcgatttcgttgctgtccgccattctcagaataattattacgacgccttactcgcagatgatcaattccacatggcactggccaatgcgggcgatgggagtgggcaacacccatcccaatgcttactcgatttaatgacgattcacgaagagttcggccactttgtaggcttaaaagtcgtcatctgtggtgacttgcgtcattcccgggtggcacggtcaaatatgcaactgctcaaacaactcggcgcaacattgtattttgccggccctgaggaatggttcgcccctgaatttgcccaatacggacaaccagcccaactcgatgacgtcttaccagaagttgacgtcgtcatgttactccggattcaacacgaacgctttgctgccgatgaaaccttatctgacactgcattccatactcagtacggtttgacaactgagcgggcagcacaccttaagtccagtgctatctggttgcacccagcacccgtcaatcgtgacgttgaaattgccgacgaactcgttgaagccccacaatcgcgaatttttaaacaaatgaccaacggcgtttttatgcggatggccatcattgaacacctattagaccaacaacatctgattcaacattaagagggggatctgctatgtatcaattgatcaaaaacggccaagtcttgattgacggccaactgcaaaaacgcgacatcgccatcgatgcaaccggtcagattacggcaattgaaccaacgattaccgcagtcccaaccgacccagaaacgatttatgacgcacacggccatttcgtcagtgccggcttaatcgacggacacgtccacttcagagatccaggcttcacgacaaaagaaacactcaaaacagggagcgcagcggttgcccacggtggttttactagcgtaattgcaatgccgaacttaaagcccgtacctgataacttgctagatttcaagacactggttgcacgcaatcaggcagaaaccagcgtccacacatatcaatttgcaccgattaccaatgagttaactgaacaaacaattgtcgacatgtcggcgtttaaggcagctggtgcagcaggctttaccaacgatggtcatggggtacaaacggcacaaacaatgtaccaagcgatgcagatggccgcccagattaacatgcccatcgtcgcgcacgtcgaagatgaatcactcgtcaatggcggcgtcattcacgacggtcaagccgctaaaaaactaggcgttcccggaattgcgagtgtcagtgaatccgcccaagtcgcccgggatatcgagctagcgcgggcgaccggcgttcattatcatatctgccacatctcaactaaggaaaccgtcaatctcgttcgccgcgcaaaacaagatggcctcaacgtcacttgcgaagtcaccccacatcatttgttactcgatgattcagcgattaccagtgacaacgcaatgctcaaaatgaatccgccacttcgaacacttgcagatcgccaagcactctgggcgggcttaatggatgggacgattgatattattgcgaccgatcacgcaccgcataccacaaaagagaaacaacaggcgttattgaaagcgccatttggtatagtagggagtgaaacagcctttagcttgctatacacgcatttagttgccaacggtccatttagtctcgcgcaactgacaagctggctaacaaccaacccggcccatgttttcaacttaccacacgccggccagttagcggttggccaaccagctgaccttgctgtttttaatttaacggataccaccacaatcgacgcaaacactttcttatcgaaaggccacaacacgccatttatcggcgaagcagtgcaaggtgatactttattaaccttggttgctggtcagattgcatatcaaaaggagtgtgtcatcaacgggtaacttctgagcatttacctgacttggcggattggtgttgcagacaccgatttgacaagtgtcgtaaaggacaagaagttgttgatgaaagcacgttcaaaaaaggagtgaactaaaagatgaaacgttaccttattttagaagatggcaccatcttccccggcaccggttttggcgccccaattatctcgacaggcgaaatcgtctttaacaccgggatgagtgggtaccaagaaaccattactgatcaatcatacaacggccaaatcatcgcttttacataccctttaatcggtaattacggggtcaaccgcgacgactttgaatcgattaaaccaacctgtaaaggggttgtcgtccatgaaacaccacgcctagcaaataactggcggatgaatatgagtcttgatgactttttaaagcaaaagaaaattcctgggattgccggcatcgatacgcgggcactcactcgccgtctgcgcgataaagggaccatgaaagccagcatcgttgatgccgcagacgatcacgcgttcgatcaactcaaggcattggtcttaccaaaaaaccaagtccaacaagtttcaacggccaaaccttatccgagtcctgctaacgggcggaacatcgtcgtgattgactttggcttaaaacatagtatccttcgtgaactgtcaaaacgcgactgtaacatcactgtcttaccatacaacacaacagctgaagaaattctgagtctcgatccagacggcgtcatgttaaccaacggccctggtgatccagaagatgtgccagaagccattgaaatgatcaaagggattcaaggtaaagtgccgattttcgggatttgtctcggtcaccaactttttgccctcgccaatggggctaaaacctacaagatgaagttcggccaccgtggtttcaaccatccggtccgagaagttgccaccaaacggatcgacttcacatctcaaaatcatgggtacgccgtggatgccgactccatcgacccacaaaaccttctgattacacacgttgaaattaacgatcaaacagtcgaaggtctccgtcatagacaatatccggccttttccgttcaattccatccagacgcagcccctggtccacacgacgctgcacatctattcgatgaatttatcgacatgatcgatgacttcaatcgccgccaaaaatagtaaaaaggggatttagtgatgccaaaacgtaccgatattcataaaattttagtgattggctctggcccaatcgtaattggtcaagccgccgagtttgattactcaggcactcaagcctgcttagcgcttaaagaagaaggctaccaagtcgttttaattaactcaaatcctgcgacaatcatgactgataaagccgttgctgatacggtttatatcgaaccgatcacgattgactttgtcacgcaaattctacgcaaagaactcccagatgccatcttaccaaccctcggcggccaaaccggcttaaatatggctttggaactggcaaacaacgggattctcgccgagctgaacattgaattgctcggtaccaagctcagcgcgattgatcaagctgaagaccgcgaactgtttaaaaacttgatgaatcagttaaacgaaccgattccagaatctgcgattgcccattcactcgttgaagcccaaacattcgttaacgaaaacgggtatccggtcattatccgtccagcctttacccttggtggcactggtggcgggattgccgaaaatgccggtgaactgagcacaattgtcaaaaacgggcttagcctatctccagtcggacaagtcctcgttgaacaaagtattgccggtttcaaggaaatcgaattcgaagtcatgcgcgacaaaaatgacaacgcgctagtcgtctgcaacatggaaaacttcgacccagtcgggattcatactggcgattccatcgtatttgcacccgttcaaaccttaagtgaccgtgaagtccaagcattgcgcgatgccgcacttaaaatcattcgcgccttgaagattgaagggggctgtaacgttcaactcgcccttgatcctaatagcgaccgctactacattatcgaagtcaatccacgggtgagtcgttcatcagcccttgcttctaaagcaactggctatccaattgcaaaaatggcggctaaaatcgccatcggtttaacacttgatgaaattcataatccaatcaccgggacaacctatgcgcaatttgaaccgatgctcgattacgtcgttgcgaagattccccgttggccatttgataaattcaacaaaggtgatcggcaactcggcacccaaatgaaggccaccggtgaagtgatggccattggacgcaacattgaagaagcattactcaaagccgttcgctcacttgaaattggcactgaccatctcgaaattccagcattgacggcagtcggtgataacgaccttgtccaacggattgtacatccccaagacgaccgacttttctaccttgccgaagcattgcgccgcggttattcaattcaagaacttagtgaattgacaaaaattgatcttttcttcctggataaactcagccacattgttgaaattgaagaacaactccggaccgataaaggtgacttagaattactcgaactcgccaagaaaaatggctttgccgacgctaaaattgccacaacttggcaaatcatgcctgcccaagtccgccaaatgcgccaagaaagtggcattcagccagtttataagatggtcgatacttgtgcagccgaattcgaatcacaaacaccttattactacgcgacttacgaacaagaaaacgaaagcattgtcagcacaaagccttcaatcttagtgattggttccggtccaattcggattgggcagggggttgaattcgattatgcaaccgtccactgtgtgcaagccatccaaaaggcgggctacgaagcaattatcatgaacagtaatccagaaacagtttcgactgacttttcaatttcagataaattgtacttcgaaccactgacactagaagatgtcctcaacgtcgttgaactcgaaaaaccagaaggggtgattgtgcaattcggggggcaaacagccatcaaccttgccgaaccactgaccgaaaatggtgtgcagattctcgggacaagcgtcgcgaacttaaaccgcgctgaagaccgtgaccaattcgatcaattaatcgccgaactcgacattccacaaccagtcggggcaaccgcaaccaatacgccagatgcgttgaagattgctgaagagattggttatccggtcttaatccgacctagtttcgttttaggcgggcgggcaatggaaatcgttcatactgcagaagaccttacacattacatgaaagaggccgttaaagtttcagtcgaccaaccggtcctaattgaccgctacttaatgggcaaagaatgcgaagtcgatgccatctgtgacggcaaagatgtcttaattccgggaattatggaacatatcgaacgcgctggtgttcattcgggcgattcaatggcggtttatccaccacaaaatctgacggatgcggaaaaacaagccatcatcacttacacgaccaagctctgtttagcacttgaatgtcgcggcttgttaaacatccaattcattattcaaaatgaagcagtctacgtaattgaagtcaatccacgggctagtcggaccgttccattcttgagtaaagtcaccggcatctcgatggcgcaactggccacccaagtcattttaggcagcacactagctgaattaaagagcccaaccggtctattaccagcgggcccactaattcatattaaagcacctgtcttctcattctcgaaactcacgcgggttgatagcttactcgggccagaaatgaaatcgaccggggaagtcatgggaactgacgtaacgatgcaaaaagcactctataaagcgttcgaagctagtgggatgcacttaccaagtcacgggaacgtcttaatgacaattactaaccaagataagacacaagcgctcgaattagcaaaacgcttccgcgaagttggctatcaaatcattgccacgcctgggactagtcaagaattccaagcagcaggtgtgccagtgcaatccgttgccaagattaatgctacgagcggcgatttacttgataaaatcaaagccggccacattcaactggtcatcaacacaaccggcttgaacgaagccccacaagtcgctaaagacagcatcgtcattcgccaaaccgccattgaacacggcattccattgatgacctcattggataccgctgatgcgatcttagcggtcctagaatctcaatcgctcctgaccaaaccactttaaaaccactaaaagagtctgaagccctttgcctaaggctcttttattacataaaaatcagaaggagtctgctaaatgttgccattagaataccaattaaccctcactaagcaaaccgaaattgcccccagtatctatgaattatgcctcaccggagacctcgcacagcaacccattgcaccgggacaatttgtcgatatcaaaatccccagtgacgcccttttattacgtcggccatttgggattgccaatgtcgaccgccaaactaacacgattaccttgttataccgcgttgttggtgaaggcaccacgatcttaagtgaatcaccggtgggcacaagcttgtccgtcttagggcctcttggtaacggttatccaattgaccaattagtagccggacaaaacgcgctaatcattggtggcgggactgggattccaccattacatgaactctcacggcaacttaatgcaaaaggcgttcacgttcaacacgtgttcggctttgcaactaaagcagccattttctatgaagatcactttcgcaagctcgggccagtcgcttatgcgacaaatgatggctcgtacggctaccaaggccatgttggtttattacttgatgcacagtttgctgatgcgacaacccgatatgatgccatttacgcatgcggaccaaaaggcttgttaatggccgtcgataatcgattcagtgagcatcccaatgcctatatctcattggaagaacggatggcttgtgggattggtgcctgctacgcctgtgtcaccaaactcaaacgtaatccaagcattcagctcaaaatttgcgatgacggacccgtcttcaaaacaaacgaggtgctcatttaatgacagacttagcagtaactttaccaggcttagctttaaaaaatccgattatgcccgcctccgggtgttttggcttcggtcaggaatacggtcgctattatgacctcaacgaacttggcgcaattattatcaaagcggcaacgaaagaaccccgacttggcaatgcgacaccacgggttgctgaaaccccaagtgggatgttgaacgcgattggcttacaaaatcccgggattgaagtcattatgcaagaaaaattaccctggttagccgagcattatcccgagttaccaatcatctccaatgtcgccggcaataccgaagctgattacgtcgctgtctgtgaacaaatcagccaagcgcccaacgtccatgccatcgaactgaatatctcgtgcccaaacgtggcccatggcggtcttgaatttggcacatcaccagaagccgctgccacgttgacgaaggcctgtgttgcagtcagccaagtgccggtttacgtgaagctctcaccaaacgtgacggatattcgtccgattgcgcaagcagttgaagcagcgggggcagccggcttctcattaatcaatacactggtggggatgcggattgatccaaaaacacgccaaccaattctcgctaatcaaacaggcggcttatctggaccagcgataaaacccgttgccatccggctcattcatcaagtccgttcaatttcgaaattaccgattattggaatgggcggtgtctcaacagctgcggatgcacttgaattaatggccgccggcgccaatgccatcgcagtcggcactgctaatttcagcgatccatttgcctgtccaaaactaatcgccgcattaccagatgaactcgctaaatatcaactaaccgatttaaaatcattcggtctaccacaggagggcactcatgactaaccctttaattatcgcgctcgactttccaaactgggaaacaacagatcgttttttagtgcaatttccaactgatgaatccttattcgttaaagtcggcatggaacttttttaccaagagggaccacagctgattaaaacgttaaaagcgcgcggctatcggatttttctcgacctaaaactctatgacattccaaacaccgttcaaagcgcgatgactgttatcggccaactcggtgtcgattacacaacgattcacgcagctggtgggcaggcaatgctcaaagcaggggcggctggtctgaaaaaaggcgccgcacttggcaacgtgcggcccgctaaactactagcgattacgcagcttacgtcgaccagcgaagcgcaaatgcaaaccgaacaactcgttaatgtcagcctaccagaatctgtcgcacactatgcgcaactcgcacagaactcggattgcgatggcgtggtctgttctgctcaagaggtgccaacgattcgcgaacacaccaatgctgattttctctgcgtcacacctgggattcggccagcaacaagccaaaccaatgatcaaaaacgggctgtaacaccacacgaagccgcacaagctgagagctcggcgattgtcgttgggcgcccaattacgcaagctacaaatccatatcaagcttaccaagctatcaaatcagaatgggagtctttcaaatgacaacaattgcacaccaagtcgcacaagccttaatcgatattcatgccgtcagtctcagtcctaacaacccttttacttgggcgagtgggctaagaagtcccatctattgcgataaccgtttaacgattggttatcccaaagtccgcaagctcattgccagcaacttagctgcggcaatcaaagcgcaattcccagacgttgaagtcatcggcggaacagcaaccgcggggattccccatgctgcatgggtcgcagccgaactcgacttaccgatggtttacattcggtcgaaaccgaaagatcacggtcaaggccgtcaaatcgaaggaccgtttaaagccggtcaaaaattagtcctcattgacgatttaatttcaaccggcgggagtgtcttacaagcagcggccgccgctcaaaaagagggcgcagaagtccttggtatttttggcatcttttcatacgaactagcagccggccaacagaatttcgcaactgctaacttaccactaacgaccttatcgaatttctccgccttattagcggtcgaagaagccgctgataacttaactccagaacaagctacatcactcaatgaatggcgccaagacccacaagcatggtcagacgcccattagaatagagtgttaaccggaaagtaatggcttgcagaacacgtttagcgtgtgccatcagccgcaccaatcaaagaagcgttaccccaattcactttggagtaacgctttttattagtcttgcacaggtttgttacgtagcttttgaacgagttgctcgtctggtgtcgtataaagtgtttgttgcccttcgtaaatcacaaaccctggtcgcgcaccgttcggttttttaatcttcttaacctgaatataatcaactggcacggccgctgataagcgcgccttcgagaagtaggccgctaagttgccggcttcttgaagcgtatcttctgatggatctgggctatcaataatcacatgagacccgggaatgttcttcacatgcaaccagatatcagttttatgggcttttttcaaggttaattgatcattttgatagttattcttgccaacgaaaatccgggtaccatcactcgcatagaaaacttcaggttcactaatcttgtaacgtttctgcttcttggcaccggttttcttagcctttaaataaccttcagcctgtaattcagctttgatatcctctaaatctttgggttcagcaatttcaatttgcgccataatcgtgttgaagtaggcaagttctgcttcggtctttgccatttgttcattgacgtaggcaattgaattccggagcttctgatatttcgagaaatacttctgcgcattttttgaagggctaatctggttcgacaaggtaatcttaagcggttcgttattgtcgtagaaattgggcaacgtgacttcagtcatgccacgttcgacttcccgcaaataggtggtcaaaatttcacccttaatccggtaatcatcagcactgtcggctgcttttaacgttttttgtagttttttcagtttcttttcatccttttgaatctcgttgcggatgaagtggatgagcgcaccaccttgttgctgcactcggtcacgctgcgccttgtgtaagtaatattggtctaacagctcactcaacgtgtcaaaatggctcagtgtccctgtcaggctctcataagggaaggccgtgaaccacgacttcttttcaccaactgttaacgttggtgtcacttggtcgaattgcttgaagaaatcagtcacaaccgccaaataattgtcatgatccattaaacgggtttgtagttcaacggcactttcacgactcatcccttggaagtgttgttgtaaccatttgacttgttcatcagcagcttcgttataataacttaaccaatcaagcgtctttaaatcagtcgtaaaaccatcaaccccggttgcagccggtggactaacataatcggcaccaggcattaagaaccgataacggttttgcgaaacaccgacgtgccggattaaatcgagaatcttattggtcgcttgattaatcaaaatcacattactatggcggcccatcaattcaacgattaagcatagttgttgtaagtcccccagttcattccgtgatttaaatgtgaatcttagaatccgatcactttcaatttgcttgatgttttctaaaatggcgccatctaaatacttccgtaaagacatcgcgaagttcggtggcgttgcggggtttgcataaggcacccgcgtcacttgcactcgcgcataagatgggtgggctgataggagaaggggataggtcttacgatttgcccgaatcgttaagattacttcgtttggataaggttgttgaattttcgtaattttgccgtctgctaaagttgtatttagctcatttacaacggcgtgggtcattaaaccatcaaaggtcattattgctcacactctctataattgaattgtcttacttattgtaacggttttgcagtggaacctcaaagaaattagttgtttgcaatcgctaacacgactattgtataatacaattatcaaattgctttatacaattaaagggggatttaccgtgcgctcaaccttagcaacgtttaatcaactgaatctattgtatcaagaacaaaagaaacactgggcgctacgactcgacttgaagttagcccaagtcaatattctaatggccattgaacccgatcaagaacgcatttcgcacgcagaattaaccacgttaaccaaactcgatgcatcgacactcagtcggcagttaaatacgatggctcaagaagggctgttaacaaaagtgaccggggctgatccgcgccaacgcgtttacgcattaacaccgaccgccaaaacggcattaagtacgttgcaacaacttcaaactgaacttgaaaatcacattcaacaaaactggagtaccgatgaacagcaacttttaaaaatcctactgaaccgttattatcaaagctttaatcgaccattaaaatgagacgccctatacatttttcggaaaatcggcatttttaggggaattaacctaccatttatgatatagttattaccgaataataaaaaagtaggtgtcaccatgaaaattgctgtagtcactgatagtaccgcttatctcacagaacagcaagtgaaagaccatcatctcttcgtcgtacctattccggttatccttgatggccaggtctatgatgaaggcgttgatataaccactgaagagttctatcaaaaattaaaaacatccgaaacattccccagtacatcacaaccaccactgggtgaaatgttaaaactatacgaagacctcggcaacgaagggtatgatgctgtcatcagcatccaccttgctagtaccatctctgggtttgtcacgacattgaaaaatgcggcaagcaccatcgataacatccaggttgtcccatacgattcagggattactgtgatgttaatgggctacttagcaatggaagcggccagaatggcacgcgacccagaagtgaccgtcgaccagattatcgcacgccttgacgatctaaaaagcacaatggatgaatgtttcattgttaacgacttacaaaacttagtgcgtggtggtcgtttatcaaacgcatctgcttttattggtagcatgttgaagattaaaccgcttttaacgtttgacgctgacactaacaaaattacggcatttgagaaggttcgttcattgaagaaggcttacgcccgcgctgaacaaatttttgctgaaacagccgaacgtgttgactatccattacgcgcactaatcattcacgctaacgatgaaccagcagcgattgcatggcgtgataagcttcaagcaaactatccagacttaccaattgatatcagctactttggcccagttatcgggacccatcttggtgaaaaagccattgcacttgcttggattaaagattttgataaagcctaatttaaaagcctgtcgaacaattcgacaggctttttttgtgacttataagatagaaacgggttcttctaaggtaaccaacttcgtcccaattagcttataaataacggatttaacggctactttttgaacaatgttgagcggttcctcgtttaaattgaattcattaaccgttgattgcgcgttaatattcgcaatttcggcattaaataaccgcacaaactgatcatatgccttaccagcggtgtcgtttgccaacgattgcgaaatcccttgtttaatgacatcgagcgggaagactaatttcataatgctgaccacaatcaattcggctaaatgatcccgattatagcgtttcttttccggtcgttcaataatcgccattttgacatagctattaatcattgttttcgttattttaacgtccaacaaaggactcagtcgtttattgacctcactaatgacttggtccatatagaggtctaaatctggaaattcagaccataatggtaaccgcaattgttgaaagtcacccaaccatttttcaaattcttgtgattgcatactgattaacgccaccaatctgttgatagtatatttattatgccatagcaattatcatttgtcactaacatagaatcgaattctattatctattgacttataatctacattcgcgctataatactcggcaaatagagaaaaagaggcgagaaccatgcaactttccacgattaaacgacaacaactgatttatgaaatatggaatgccattacccacgggattggttttttcggtagtttaacgttagtcatcatgctcctggtcaaaagcattcataaaacactctcaccagtcgcgattgctagtctagcagtgtatggcgccacattactgctactgtatctcgcttcgactttatttcactgcttagcatttaccaaggccaagcgcgtgtttcaaatattcgaccatagcaatattttcttgctgattgctggtacctacacgccatattgtttgatttttattggccatgcaacaggaattagcttactgattgcaatctggacactagcgattgccggtattataacgcacattttgagccacggtcggtaccaaaagattgaaacaacgatttacgttgtgatggggtggttatgtttattagctggtaagaccctttatgtcaacctcagtccagttggtttttggctgttagtcagtggtggcgtagtctttaccgttggcgctctaatttatagttttcctaaaattcctggcttacatttgatttggcactttttcgtaatgctcggaacgaccctgatgtttttttcaatttacctcaacatttaacttgaaggagtacaactcatatgacaattaaaattgtaacggactcatcgattcaactgacagcagacgaacgcgccaaatatgacattcacatcgtccccttaacgattcaacaaggaaatgagtctttcattgatggacaaaccattacccgcgctgaatttttaagtcgcttacaaaatgcaacgaccgattttccaacaacaagtcagccaactgtcggcagtttcgtcgatttatatgatcaattaggggctgatggtagtacgattctatcgattcattgtaccggcttgttaagtggcacaatcgaaggggcacacacagcagcccaccaatcaacaagtgacgtacacgtgattgatagtaaagcaatcgaccgtggacttgcttatcaagtggttgctgccgcccaagacgttgaagcagggaagcctcttgatgatattatcgcgcatctcgatgacatccgtcgtaaaaccgaaacctacgtctttttagattcacttgacgcgcttcaacgcggtggtcgaattagtagaatggccgggctattaacgaaaatcattaaactcaaggtaattgtgcgcttaacagatacggaattagaagtcgtcacaaaggggcggggactaaaagcttttacaaaagaaatcaacaatatccgtgaatacttagccacccaagacgttgcggaaatcggcatctcacacgtcggaatcacggatgaactatccgctaagatccaagcaacgcttgaagaaacacagccccatgtgccttatacagtcgcactaaccagcccggtcattatgagtcacgttggcctaggggcgtttggtattttctatcggacaaaataacagctgacaagaacgtctcattcgaggcgttcttttttattgccccttaaaattgcgcaaaatctagttgcgttatttcaaagaatcgtttatattagaatgaacgttctaataagagaggagcatccagatgcggacaaaaacatttgaagcaccggttgtcttagacaaagccatgcttgtcttttggcaacaaggctatgagaatacctcaatgcaaaacctagttgatgcaatggggattcaccggcgcagtatttacgatacattcggcgataaacatgaactgtttatccaagtactagcacattatcgtgaccaaattaacgagcgtttcgagcaagtactggcaacacataccaatttaaggtcgcgcttaacagccatttttgaaatatttattgaccatccggataaccaaccagccggctgcttagtggtgaataccgcggcaacgttaaattcattagaaccagacatccaaacgctgattcagcattatttaacccaagaaaaagcactgttgcaggcattactgattgccggccaggccgaactagaaccgtctgttgcaattgatcttttagctgcatcgcttcaaagtgcgctcattggtatccgggtcatggctaaagtgaacccagattcaactacgctaacagcaattgtgcaacaaaccctacaaacactcccgtggaaagaggttttctaatatgaaagcagctcaaattaaaaaatataatcaaacactagctgtcacgattcaagaaattgatcgcccacaaccgctagccaatgaagtactcgtcaaagtcgcctatgcagcggtgaatccattggatccaatgaatatccgcggcgatactaaattaatgcaaaactatgctttaccactgactttaggcaatgaaattgccggtgaaatcacagcgattggaacagacgtcactgatttcaaagtcggggatcaagtctatgcgcgtttaccattggctaaaatcggtggctttgctgaatatgtcgcggttaccaccgatgcaatctggtacacgccaaaggatttatcgctacgtgaagccgttgcaatcccactgactggcttaacggcttatcaggggctatttgaggaattggcagcccaaccgaaccgaacgctgtttatccctggtggttcaggcggtttcggtccaatagccgtcccaatcgcaaaatcactaggcttaaccgtgattgtttcaggcaatgcagccacgcgagatcacattttgaatttgggtgctgaccaatatatcgattacaaaacaaccgattactgggaagtttttgatcaaatcgattacgtgattgatacacgcggtggagcagatattgaacgtgaaatggcgattatgaagccgggcgggcggattttaagcttgattgccggtccaaacaaacaattcgctaaacaattgcaattaccattttggaagcaactcttattctcgttggccgggcggaaatgggatcgcctcgctaaaaaagcgggcgttgaatatcgctttattttcgttcgttcagatggtgcccaactcaaaaaaatcactgaaattgttgaacaacaagcgattgtaccagccatcgatccgcatcaattcgatttagcacacgttaaagaggcactagaacttgttgctcacggccatccaactgataaagtggtgattaaggttcaagcgggctaatcaagatgacttatctaacaacccccaaccaatttattcaagatcaacaaggccaacggtttgcttaccgcgaagtgggtaccggtcgcggcttaccacttgttttattgaatcacttatcagccactttagataactgggaccctgcattaattgacctgatcagtcagcaacgacgcgtgattgtctttaataatcgtggtgttggtttctcggatggcaaagtccccacgacgattgagcaaatggtagctgattgttatgcttttataacagctatgcagctcactcaattcgatttacttggattatcgatgggtggttttattgcacaggccttcactttaaaatacccctcaagcgttaatcacttaattttagtcggaacaggtccccagggtgactcagaaatcgccaaagtggggcgcataacaacttttgacttaattcggtccttcttaacgcatagagacgttaaggaatacctcttcttcaccagaacgccccaaggcaaacaggctggtaaagcgttcattaaccggttaaaacagcgtgaaattgttgaagataaagccattacgttagccacttatcgtcgtcaattaatagcaattaaacagtatgcgcacgatcaaccggcaaacctggcacaaattaaccaaccaacattgattgtcaacggcgatcacgatcgaatggtacctgttaatggttcatatgaattacatgaacggattttaaattcccaattaaaactttacccagatgctggtcatatggcgttattccaaaatccaaatgactttgcagctttgttggctcagtttttaaatcactaattacagaagcgtcattttaatatggcgcttttttgctgcgcttaaacgctggtgacgagtgggtaggcttagttaattttttaaatctattttagtttacataatatatattatgcgaagaaacgcttatcccttgaaagagcgctaaaataaccacttattatccaacatcattcaattgatttgatgaaccgcacttaacgcgtttgttttttacactgcacgattcataaactattacaagttactcaacgccaatatgatgaatcaaactgactggccaaccgatatcgccaaacttaactttaaatgcagaattcatctaagctcaggcacaaatccgtgattaatctgacgattatgccagattttaattggtaaatacgcatattaacacatcttagccttaaaactcacatatcaaatcgttaaaaaaggccttaaacgttgatataccagcttttaaacggaataaggatctttaggttgctatgcagatagtcgaataagaccatctgatcatcagtttgcggaacggtttgcaatacaagtgttgttaaaattatggttttaacaacacttgtagtattctcacctcatttttgctaaactatctttaaactgctaattaaggagtcttccatcatggatcaacaacgttacttagaactctgcgaaaagcaactcgccaatcttccggattacattcgtaaattctacattaaccgccaggcaaacgcctactcttctgcaacgctctatcaatacttacaagaatacgttcgctttttcacctggttagttgatgaacagatcgtcgtggtcccctctatcgaccagatgccactgaccgcactcgaaaaaatgaaactcgaagatattgagctctacaagatttttctaatgaataagcgtaaacaaaataaccataagctctcctttcaagccgttaaccgctcgattaacgcattaaatgcgctctggtacttcttaaccattgaagccgaacaagctgatggtgagccttatttttaccgaaacgtcatgaagaaggtgaaactacttaaagcttcagaaacaatggcgacacgttcacgacacatcagcaaacaactgctgaccggtgaaaagaaacacgacttcatcaccttcatgcaagttgattaccctaacttgctttctaatcgccaactggcatcatacaagcaaaattgcgaacgcgatattgccatctgtgtactggcgctggcaacgggcatccgactatcagagttggcccaagccaacatcaacgatttgaatcttgaacaacttacaattaccgtgatccgtaaaggcggacagcaagatactgtcccaattgctccgtggagtttaccttttttaagggattactgccagattcgtaaatcacgctatctaaaagaagataatgaacaagccttatttgtcagtcgctatcgtggcagcgccaagcgtatgagcaactatgccattgaaaagttagtcgcgaagtattctgaagcatttggcgtgcgtctcacaccacacaagttccgccatacacttgccactgatctcatggcggcaactcatagtgaaacaattgttgcgacccaactaggccaaacgaccacgcaagctactcacttatatacgcacgtcgttgctgatgaacaacgctcggcaatggaccagcttgaatagccactattagtgctcttcttggcaacgattatcaatgtcgttctaacagtcatttggtttacatcaattcgtcgatttacacattgcttgacttataccagctatcgagtatactgaaagcgttcttaaaaattaaatgttaaccatcgcaaaggggagccattggctgagagtgattttaatcagacccttcgaacctgtttgttaagacaagcgtaggaattgtgatggagttgaaatgataactccttttttgtgttggttgaacaagaaaaggggttatttttatgcaacatcagcgtctattgattcagattgaaggggcaatcatcgcggcatttgccgtggcattggaatacatcccccatacagtggggccttccgcaatcgaagtctcctttgggattatccctattgtaatctacagtttacgccgtggtgccattcctggaatggtctccggcttaatctggggtctactagacttaatcttacgtggattaggaaacggtagtgtcttgaacgtatggcaaggattgctagaatttaccattgccttcatggttgttggtttagcaggtatcttacaacgacctattcaagcaagtattcaaaatcatacaaaagtcaaaacgatgacccttttatggatggccgcattttttggtacttttgcaaaatacttctgccacttcttagccggtgccgtttattggggctcatacgctcccaaaggtatgaatgcttggctatactcgctcactgttaacggtggcagctttatcgctagcttcattctaaccggcatcgttctatgtatttgtttagccatggtgcctaagttatatttaccaaaagacatggttttacacgtacaatctgaaaaataaacaaaaaaagagccgtattaacacttgaatggtgttaatacggctctttttaattcccttaacgatccgttctagctcgtaatgcatataagattgaaactgtatcgacaacctcttggaataaagcccccactaatgctggaacaatcccggtgctggcaatcaacattaacccaatacagattgcaatcccaatcaaaaccgcctggcgagcaacgcgcatcgtgtcacgcgcgatttgaacggcacgactaacccgtcctaaatcatcttttagaatcaccacatccgctgattcacttgcggctgttgcgccatgggcccccatcgcaatcccgacatcagcacttgccagtgacggtgcatcgttgaccccatcaccaaccataattagtgggcgttggtcttgcggtacttgttcaattaaatgaatcttatcgactggtagacagcctgcatggacgtcatcaattccgacttgttccgcaatctggtgcgcagttgtcgcttgatcgcctgtcaacatcatcaaacgcgtaatccccagttgatggagcgtctgcatcgtggccggtgcttctgatcgtaaatgatcgataaacgtaatgtaccccgcatattgatcattgatcgcaacgtaaacagtggtttgttcttgcagaggctgttgcgcatctggcgtcacgaattgatgtttcccaacacgaaccgtttgtccagacgacagcgtcgcaactaccccagcgcccgttgcttcttttaatgtttcaattggttgtaattgttctacctgtgccgctttaacaagtgaccgtgctaaaatatgcgaagattcttgctccgcactagccgccaattgcaataaatcggttggtgcgataccaatcactggcacaacttggtcaaccgtcaattgaccattcgtaattgttccagttttatcaaacgctgctgatttagcagacgctaatttttcaattgttgtgccagccttgacaataatcccgtttcgactagcacgactcatccctgagattaacgcgataggcgctgccaatattaatgggcacggcgaagccacgacaagcacttctgcaaaccgtactggatccttagataaccaccaagctactccagcaatcacatacgcaactaatgtaaatggcacggcatatcgatcagctaagcgcacaaaatgcgctggttgtgccgcagaggtctctacaagccgtacaattgcttgatattggctattaacggctaattggtcaacttgcatggtaaccgacgtatcgccgttcacagagcctgacatgagctcatcatttagtgctttttcaacggggcgtgattcacccgttaacgatgattcatcgaataaagcacttcctgcaataatatgcccatcaacagggaccaattcgccaggtttaataatcacttgatcaccaacttgaagcttatcgactgaaacatcttcgaccgcatcattaacaaggcgatgcgctgtttgcggagaattatcaagtaatgtctttaactcacggcctgctttatgcgctgcatagtcttccaatgagtcgccaccagttaacatgaccaagaccattaatgctgcccaatattcaccgaccgctaacgtcgcaataatagcggtaatcgctaatagatccaccccgtattgaccagattttagcgttttaatcatctcaataaacatcgagagcgctactaagctccccgctaaactcactaaaatctgtgcccacaatggctcatgtagcaaaaacgccaagcatagcgcaatcacacccacactaattgttaaggcaaacttgatggtatgtttcatcgtcaatcgctccttcttatgaattcatttacattataacacatttttagttagattagaataattccaatctggtggcacacaaaaaaagccccccaaattaatgagggggcttttttgcagatagttggtttataatagcagtctgcacggcagtcatcgctgctaataatagagtcattcgttttatcacgggtgatgtttttttttgattagagagtgctttttcagttttatgaataatcgattcaatcggggcttgtgcctcgactaaggcttcgactgttatgtctgtgtacccgttcaataaatcacgaccaacttctaatgcgtaaagcctattttttaataaagtaaattgagccgaacccgctacaaacttcagctgactcttttggcaatttcgaattgtcgcttcaatcacttgaattgcatcaatgctttcctcggtcatttacctatcctcctaataaaaaaataaagccccgaaggactttattattaatcgttattaaaatgcttctgttaattgtggaaccacttgtttcttacgtgaaacaacaccggctaattgtgcacgatggttgttcaattttacgttgaatgctttttcaaaggcttctgctggttcaccgataacaagcgcttctgagttactgtttaagatgtcagtaatcaaaagtacgaataagtcgtaaccattagctttattgtctgcttcgatagcagcttcaaaagcagcttggcgtttgaagaccgcttcgatatcaactgtattcacttgatcgatacgcacttttttaccagccatatcgaatgttttagcatccgcttcaattaattcagcttcgctcttatcatctaagttagtgcccgcttttaacatttcaagaccatatgattcgaaatcaatatcagcaatttcagccaatgtcttaatcgcaatccgatctttttcagttgttgtaggtgatttcatcaacaacgtatctgaaatgatagcactcatcattaaaccagctaattgagctggaatttcaactttgttttcgttgaacattgataataaaattgtgctggtacagccaactggttcagcgcggtagaataatgggctgactgtttcgaagtttgcaattcgatgatgatcaacaacgtgcgtcactgttaaatctttgatatcggcaacactttgttggctttcgttatgatcaaccaacatcacactgtcaacttcactgcttgcttctttaatgatgcgaggggttgctgctgcaaaatgacgcaatgcatagcttgtttcttcattaggttcacctagcgcaacggcttctacgtcgtttcctagttgttgttgaagataagcaaacgccattgccgcaacaattgcgtctgtatctgggttttggtgaccgaatactaattctttactcatatttatacagaccttccttttaaaaaaataacatcctaattataccaaaaatattagacgattctacggttttgctctctaatccgtgttaaataatctttttcttctaaataatggtcgaattcacggaaaaagctattaatccgtggaatatcttccttttccttgcggaagacaaaagctaattcgaactgaatggccggatcaaattgaaccgcgtttcccttaagtcccaaattatgtgcttcataaaaactctttggtaaagctgtacttaattcagttgcttcagcaaaacgcatgatttcaaatggtgatgtgaattgagccgcactcactggacgatcaaccaattgattcttataggcttcactgatgaattgatttaaatagtattcatctgggtatgtcacccatttattatctaatgtatctttaaaacggatcttcttacgcgtctttaaagcaggatcttggctgataaagagtaagcgttcatccacaatcttatgtgacttataaggtttccagttcttaatgctgtcatctggcaaatacataatggcaatatcaattttattattttcaagtcggtcccagatttctttccgagtcaataagtgcatgctgacttcgatgtcaggaaattgtttatagtattgaattaagaaggattggataacactgatttccatcgatgctaaaatcccaatattaatcttaccgcgcgtcgcactcgttgaactttgaatttcatccgtcgcagtatttaataaatcatgaatctgatgggtagcatccaacatcgtccgaccagcatccgaaatatgtaacttcttgccgactgaataaaataaaggcgccccgactatccgttctaattttttaatctgttgggttaaagcaggttgcgtgataccgagtagttgtgccgcttgggtataattcatcgtttccgctaactgtaggaaataggttaatgttttagaggagaagatattttcttgtcttgttttcattttcaaatctccgttctttagtttacgcctatcattataataataaagatataaaaaaagagcaacccctttcgttgctcattcttattaaaggcttaaaattttcttatgttagcgttgctgctttggatagtctgctgtatgcaatagacgctccgcattgacaacgcgatcgtgggtcggtggttcaatccccgctaacggatatttaatccccatcttttcgtatttcacgattcccatcgtatggtagggcaacacttcgactcggtcaacattgtttaacgtttgaatataatcccctagacgagtgagatactcatcgtaatccgtccgttctggaatcaagacgtgccgaatccacatatgatgaccatgatttgacatatattcaatcatttctaaaatatgttcgttagaaaagccggttaactttttgtgccccgctggatcaatatgcttaatatcgaccattgaaagatcggtatatttcatcaattctttgaatttactaaagaagggttctttatacgtaaacggctgcccacaagtatccaaacaggtattaatcccttgtgccttacactttttaaataaatcaattaaaaaatcaatttgaattaaggattcaccaccgctacaggtaattccgccatctttaccccagaaggccttatatggcagtgcctttgcgattaattcgtctgcggtataagcttctccgctaccaatattccacgtatctggattatgacagaattcgcaacgcatgcgacagccttgtagaaaggcgacaaaccgaattccgggaccatccactgaaccaaatgtttcaatcgaatgaacatatccaattggcacctctggtgttatcggggtttctggaacaacattttcagttgataaccgtgttgtaaatttaattgccatttcactttcacctcttaaaagaaaagctatgctttctggtaaagtcgttaattcgcgttaacgaccttaccagaaagcggatattgctatccactttcgttagattacatttcgtcaaagaacgttcttgagataacgtcgtcttgttgttccttcgttaaatcagcgaagtagacacaataacctgaaacccgaaccgttaatgttgggtattcttctggatgttgttgtgcatccattaaggtttgcttattgaagacgttgatatttaaatgcatcccttgattaatcatgtaaccatcgaccatgttcacaagcgcgtctttacgtgcttcatcatcatgccctaatgtatttggtgtgacaccaaacgtatttgaaatcccatcagttgcataacggtatggaatcttcgcagttgaaagtaatgatgctaaagcaccgtttttttcagcaccgtatgctgggttagcacctggtgagaatggttcgccagcttgacgaccatttggtgttgtcccagtattcttaccatacacaacatttgatgtgattgttaaaacagatgttgataattttgagccacgatataaatgatgcgtattcatcttcgtatagaaagtcttcactaaccatttagcgatatcgtcagcgcggtcgtcattgttcccataacgtggatagtctggattttgcgcttcgaaatcgactgccataccgtcttcatcacggataactttaacttggccgtatttaatcgctgagattgaatcaaccgcatgtgatagaccagaaataccagtcgcaaatgtccggtctaaacgactattcttcaatgccaattgtgctgattcatagtaatacttatcatgcatgtagtggatggtgtttaaagcattaacgtaaacgtctgctaaccaatctaacatcttatcgtatttacccatgaattctttgtaatcaatgatttcacttgtaattggttgataagctgggccgacttgagctttgcctaattcatcgatcccgccgttaattgcgtaaaggattgtcttagccaagttagcacgcgcgccaaaatattgaacgccgtctgcaattggttgtgcagaaacacagcatgcaatcccataatagtcactcccccattcattacgcatcaaatcatcgttttcgtattgaatcgttgaactcttaattgaaacttctgttgcatagcgcttgaaaccttctggtaagcgatctgaccaaagtaaggtgatattaggttctggagcagcacccatattttccaatgtcttcaagatacggaaggcagtcttagtgacatgatgacgaccatccataccaatcccacacattgataatgttgcccagattggatcacctgagaataatgaattataatcttctgtccgaatgaaacgaaccatccgtaacttcatgacaaaatggtcaaccatttcttgcgcttcagcttctgtaattaagccccactctaaatcacgttggataaagatatccatcgttgtatcaatccggccaactgacatcgcagccccgttttgtgtcttaatagcggctaagtaaccgaagtaaatccattgaattgcttcttgggcattcttagcaggtcttgaaatatcaaagccatagctagcagccattttcttcatatcttgtaaagcacgatattgttcattgatttcttcacgaagacgaatgacatcgtctgtcatttcaccgtcgccaacaccattaaagtcacggactttttcttcagctaaacgatcaatcccatagactgcaatccgtggtaagtcaggaataatccgaccacgtgcataggcatctggaaggcccgtaataatcttgtagtgacgtgctttacgcatgtctggtgtataagcatcaaaaacaccttgattatgtgtcttgcggtattcgttaaaaatcttgtgttgttctggatcagtcttaaagccgtatgcttccaaggcatcttcggccatccgaatcccaccaaatggcatgaatgcgcgttttaatggggcatcagtttgtaatccaacaatcttttcaagatccttgtttaaataaccagggccgtgtgacgtaactgttgcaggattatcattgtctgcggctaaaacgccacctgcttcacgttcttgtttcttcaattccattagttgatcatttaacgttgttgttgcttcggttggaccagctaagaaactttcatcaccgtcataggcagtaaagttttgttggatgaaatcacgaatatcaatttcatcttgccagtcacctttgttaaagccgtcccaatagtcggctaagttaattttttcggtttttaccatgtggattacctccattagtcaagtgttgtttatcacagttttcacaattttagtataacacatcacatagtttatgcaagccctttctttttgattgtttagaaactcttaaactcttttgaaagattgatttatagctatttatctacttaaaatatttttataaccccaccatttaaattgtgcaaaacttattttgctgttatagtacaaaaccaaaaaatccgcatattatgtataacagaaaaaagcaagtcatcacatagatgacttgcttttttattattttgactcgtcttcatttttaactggaataggcgtttgaacaaatgccggttgtccaacttcatcaacatccatcacaaaactaccgttcgaataacggtcggcagttgcatgttgataagggttaattgcaatcacttcttgctgatcagtatgaatcagtaactcgcttgcctgctcaacactaaccattgctgctacccgatgtggttctttcttcaattcacggagaattaagaccccacgacgcgcacgacttgttaaaccaacctcacttaagagcatccgtttaaaggcgccccgttgcgtcacaatggcaacggctgcatgtttatcttctggatgatataacgtaaagccgatgacaacatccccatctttgagatccattaatttgaccccactggccttagcacctgatacagagacttcagataaggtaaaactcaatccataacctttatagctagcactaaagacggctagcccttcatcacttggaatccagttcacgtttgtcacatgagcatctgcatgcaacttaataaagtcttgtgccttagaacgatatgttcgacttggcaagaggtcagagaaggcagtttgtttaatatagccatcatccgtcccaatcacaaagtagccagcctgttcatttggcttaaaggcaaatgctgcaataatcgcttcatcagccgccaaaccaatcgattgcgaaatatgttcgcccatttccttccatttcaaatcagcaatttcatgaactggtcgttgaattaaatgtccgtaattggtgaacatcatcaattgatctaaggtttgtagtggcttttgtaaaatggcaaaatcgccgtctttcaaaccgctgtcggccccttcagatgcttgatacgagcgcaaactactacgtttcaagtagccgtcatggctaactgcaaccatgacggtttcgtcaacaacagtcacacttgtatcaatttcaagcgtctcaatttgtgcttcaatttcagtttttcggtcacttcgataagttttgaccattgcttttaactgcgccttaatcacccgtgcaagtgcttttggatcaccaagaatcatccggtattccttaatcgctgcatcaagttcagctgattcttgttccaaagcagtcacatcggtattcgttaaccggtataattgcagtgaaacaatcgcttcagcttgggcttctgtgaaggcgtagcttgccactaaattatctttagcgtcttttttattcttgctaccacgaatcgtcgcaatcacttgatctaaaatcgagagcgccttgattagccctgcgacaatgtgctgacgatccaatgccttttgtaaggtatattttgtccgccgaatcacgacttcttcttgatgttccaagtaggcatggaggatttctaataagccaacctgtttaggttgcatatgcgagatggcgaccatattaaagttatatgtgatttgcagatccgtatttttgaacagataattcaagatcccttgactatccgcttgctttttcaattcaacaacgactgataagcccatccgatcactttcatctcgtacttcagcaatcccatcgaccttctttaaaacgcgtaattcatcaatcttcttgaccatcatagccttgttgacttcataaggaatttcgctaatcacgatttgttcccgattgccgcgtaattgttggatgctggtttttgcccggacgacaactcgaccgcgaccagtttcataggctttcttaatcccatcgaccccttgtaagatcccaccagttgggaaatcaggtcctttgatgaaggtcatcattttttctaacgttgcatcgggatgatccaatagatagaccaagccatcagtcacttcacctaaattatgtggcggaatttcagtcgcgtacccagctgaaatcccagttgccccattcactaagaggtttgggaaccgagctggtaaaacagtgggttcttcagcggtatcatcgaagtttaaaacgaaatcaaccgtctttttatcgatgtccttgagcatttcaccagcaatcttacttaagcgtgcctcagtataccgcattgctgctggtggatccccatccattgacccattattcccatgcatttcaatcagtggttcacgtaatttccagtcctgacttaaccggaccatcgcttcataaattgaactatccccatgcggatggaaattccccatgacattcccgacagacttcgctgacttccggaaccctttatcataagtattcccatcgatggacattgcgtataaaattcgccgttgaacgggttttaacccatcgcgaatatctggtaacgcccgctcttgaatgatgtattttgaatagcggccaaagcggtcgcccatgacttcttcaagcgttagctcttgaattttttgtgcttcatcagccaaatttaatcactcacttttctattcgtctaattggtcaaataaatccacttcagcgcttgaagttgtcggtgctggttgaccattcgttgtatctaagatgctaccatcttcagccattgtgaacttaacgttttcttcaatccacttccgacgtggttcaactttatcgcccatcaacgttgtgacgcggcgttcagctaaggctgcatcatcaatccgcacccgaattaacgtccgactcgttggatccattgtggtatcccaaagttgatcagcattcatttcacccaaccctttgaaacgttgttgactgtagcctttacccatttctttagcgacgactttcaattcatcatcagtccaagcataggcaatcttcgtttttgccccagcacctttttggagcttatacaatggtggcaaggcaatgtagacttttccggcttcaattaacggccgcatatagcggtagaagaaggttaacaacaaaatttgaatatgggccccatcggtatccgcatcggtcatgatgatgactttatcgtaattgctgtcttcaagtttgaattcagccccgactccggccccaatcgtgtaaatcatcgtgttgatttcttcattttttagaatttcttgtaatttcgctttttgggtatttaaaactttgccccgcaatggcaaaatcgcttggaatttccgatcgcgcccttgcttagcagaacccccagcagaatccccttcgaccaagtacaattcattcttcgccgcatttttcgattgcgctggtgttagcttcccagataataagccatcggatttcttctttttcttaccatttcgactttgttcacgtgctttacgcgcagcttcacgtgcttcgcgtgcttttaatgatttacgcactaaggcttgcgcaaattcaccattttcaagtaagaaaaagctcatttgttcataaaccaaactatcgacagctgtccgcgcttgtggcgagcctagcttacccttggtttgcccttcaaattgcaagagttcttctggaatccggacagacaagacggcactaagaccttcacgtacgtcggagccttccatgtttttatcccgttctttgagcaagtttaccttgcgggcgtaatcgttaaaagctttggttaagccggctttcatcccagcttcatgggtcccaccatcacctgtccggacattattcacaaatgacatgatgttttcggagtagccatcgttatattgacccgcaaattcgacttcaatgtcttctttggtgccttcgaaatataacttattaccaatcgtatctttatcttcgttcaaataatcgacaaatgattgaatcccttctgggtaatggaagacatcttcacgtgctggctcagcgcgtaaatcggtcaacgtaatcttgacatctttgagtaaaaaggcagattcgcgtaatcgttctgctaaggtattgtagttataagtagtcgtttgaaaaattgtcccatctggcttaaacgtaattaacgtgccgtttggttctttagctttgccaacttttttcaaggtaccaaccgggtggcccccattttcaaagcgttcttcgtaggcaacaccatcacgcacaacgcggacggtcaaccattcggataaggcattgacgacactcgcgccaaccccatgcaaaccgccggatgttttataactgttttgggtaaatttcccacctgcgtgaagcactgtcaaaataacttcaatcgtaggaatcccagattggtgcatcccagtcggcatcccacgaccatgatcacggacactaatactattatccgcgccaattacgacgttgatttctgaaccaaaaccagccaaggcttcatcgacagcgttatcgacaatttcgtacaccaaatggtgcaagccgcgaccgtcagttgagccaatgtacatgccaggccgttttcgaactgcttctagaccttctaagacctgaatcgaattatcattataatcttgtttttgatttggcattcaagtatgactcctttgtttaaaaatgaacagataaggtatattatcaacaagtttggatgattttacaatcaaaaatttaaaatttcttgccaatacaaatgtatgttcgtattcacctattctaacatacaatattccttttcccttgtcaaaatgctaaaataggggaaacaaatgccacaaataggagtttttgtcatgaaacttagtcttatctttattcttgcgtacctgatcggttcgttcccatcaggcgttattatcggccgcgttttctgtcacaaagatccccgagatgctggaagccataatatcggcacaactaactcgtatcgcgtgctcggcccaatcgctgggacagccgttttatttcttgatattttaaaaggcacacttgctgctagcctaccgatgatttttcacatccccaatcatgcattggtcttaatcgtcggcttagcggccgttgtcggtcatgcttactccatctttttacactttacggggggaaaagccgttgcaaccagcgcaggcatcttactggcatacaatccacttttcttcgtaattgccagtaccatctttatcagtgtcatcctgattacaagtatggttagcatggctagcatcctcggtccattgatgattgcgattttatcgttttacacgcatgattggctactcggttcgattgcgaccttggtcttacttttcctggtctaccggcaccgcgaaaatctacaacgcattaaaaatggcactgaaaacttagtgccatttggcctgtactatcgctataaacaaaaacatcaataactaaaaaaacgccgaacgggcgtttttttgtgcaatcagttaaagatcaatcaattgttcccgttcattgtaaaatgatcgataagctaagtaacacgcaatcactgaaccaagactcgttgccgataataacataaaggtcactaatatctggtacataatggccttgactggatcaattccggcaaaaatcaggcccgacatcatccctggcaggctgacaagccccatcgttttagcggaatcgatcgtgggtgacatccccgtacgaatactctcacgaataatggcaattgatgcttgtttagcggtcgctcccaaggcgagtcgttccaaaacaggttgccgttcatccttaaattgcgccagtaagctgcggtaactcaagccaatggcgaccatcgagttggaagcaatcatcccagtaattggaataatttgcgatggaataaacttaatcgccccagataaaacaagtaatcctaacgtgaccccagtacttgttaaaattgcgataaatgaaattggaaacccgttgcgtagtttccccgcccgctttttggcatttgctgcggcgttaaaaataatgatcagcatcatcaataacgttagccacacatcgttaatatgaaaaatgaatttcagtaaataaccaacgataaataattgaatgattgcgcgaaaaacactgataatcatatctttttcaagaccgattttttcatggaagctaatgactaatgcgacaaacactaatgtcacagcaaacgtcagtgaaagaccattaacggctaagttcatcttgatttaccaattcgccagcaacaatttgcacctggcgccctttccgttgtaattcttctgtatcgtgggtaatggcaataattgtgagcccgcaatcctcattgaggtgctggacaaacgccaatacaattgccttattagcggcatctaaaccagtcgtaatttcatcaagtaataaaacttccggtggaaataaaacattacgaatcaaggcaattcgttgcttttcaccgcccgataacgtggtaatttttttcgttagtggcatgttggctaacccaaccgctgccaacgctttttcaattgctgccatatcgaccggtaaattacgaatctcgtatggaaaacgtaaattatccccgattgtttcaccaaataacgttgcttgttgaaaacaatacgaaaccttttgtcgatactgattgggactaaactgggtcagtggctgatcatttaataaaatggtgccacgtgtcggcgttagtaagtccgcaattaaccgtaacaaggtactcttaccacccccagaaggtcctgtaatcgttaagtaactgcctttttcaacggttaaattaatgtcggttaaaatcacttgttgatcaacctgataagataatcgttcgatttttaattgaatcataagtccctcctgacaattatttaattcatagtatacacgaaattcacttaattagtgtcttctgctgattgaaaaaaggacacctaaaagcttatactaatattaggatatattaagtgatggacgttccgtccgctctggaaaagagatgttgataatgttaaatagctttccgcaagtcatgacaattgccggttccgattctgatggcagtgccggtgcgcaagcagatttaaatactttttttgcccgtaatgtttatggtatgagcattttgacagcctgtgttgctggaaattcatatgggattcgtgctagccaagcactgtctcccgactttattgatgccgagtttgaagcaattgcagccgactttcaggttcgcgcttgcaaaacaggaatgttaaccgaccgtgagaccattctaaccgttgctaatcagttgaaaaaacatgactttggtcccctagtgttagatccggtcattattaccaagcatgaagcattgttgttggcagatgatgcttttaacacactaaagacagaattaatgccccttgcaactgtcctaacgcctaatttctacgaagcgcaaaaattaactggtattgaactgaagacacctgctgatttccaagctgctggccaagcactattggcaatggacgcaaaaaacgtcatgattaaaggccatcacgaggccggacaatcaatcgttacagactacgtttgccttgccgatggacaagaattttggctatcagaaccttacgttgaaaccacccatattaatgggacgggcgattcactttcagcttgcatctgtgctgaaatcgctaagggacagacaattgaggctgccattaagaccgctaaacaatttgttcaccgcgccatcgctaacccgattgaagtcggccacaagtacggtccaattaaccaccatgcttaaaatacaaaaaagcccacggaaaaatccgtgggctttttgaatgtttagtgttctgcttcttcaatatcggcattgacttgttgtaagtcaaagtcactctttaaaaaagcttcgttatcacttgggaagtgctgttcaaacgtttcaaacggttggagcgtcatttgagcatcgaccacggtatagtctagaatatgaccgccaaagtcgtgcgtatcgtttaagaagtgtacgtgatagcctgcaacagctgcgccttgataaagcgctggtgcataatacccaatcaacgtgcccgttacgtctgtttgttcaaactccggttgcactcgggttgcagcagtcaaattcggataaggttcctgttgtgtttggacggcccgcgtatgcatgactttgaaagtcccagtcattttaaccgcaaaaaacaagttttttaacggtgcttgcgctagaatttgcgtttctaactcagcctttgtgcgttgatgaaccgcttgtgtaggtaatgatgaatcttgccaatgcactgtcgcaaatggaactgtcgcatcaggtgcgagttcagtcacttggccatccccattcacagtataagcatggccatctaataagaccagttcgccagctaaaccgtgcgccgtcccgattccaaaattcccatgggttaataattcagcaacggtcattgtccctgtaaagagccccggaattaatagggctaacgttccgtgttgataaacgcgtttgacatcatttgtcattgattttcctcctcaaattaaacgagttggtcaggtaataatgcttggcctaataattgattatctttgtaatcaacgggcacatctacaaggacgggaccatcaatggcaaaggcttgatccaatactttaccaagatctgcggctttttcgacccgtaacccggttgcaccaaaactctctgcatattggacaaaatcaacgggaccaaacttaacggccgctgattcgccatatttcatttcttcttggaattttaccatgtcataataaccgtcattccaaataatatgcacgatgtttaagttcagacgcaccgcagtttctaagtcttgacctgagaataagaagccaccatctcccgaaaccgacacaatttgtgtatttggccgcactagagcagcactgatcgcccatggcaatgccacacctaaggtctgcatcccgttactaaagagcaagtgccgtggttcgtaacttctaaaatgccgcgccatccagatgtaatgactaccaacatcgaccgtgacggtcatttcgtcggtgacccgtgcttgcagttctgaaataatgttcaacggatgactaagtggattatcggtcgtcatttcaggtgccgtgtcacgttgattgagttctgcgtgcaattcaactaaataatcacgcacatcgcccgctagttgataccccttcatataaggtaataaaaagtctagggtctgcgcaatatcgccgaccaattctttttcaggttggaaattatgatcgatttcagtgcgcatatcatcaatcaccataatgtgcgcatcactttcagcgttccagttacgcggttcatattcgattggatcatagccgactgcaataacaagatcactgcgttttagaatgcggtcgcctggttgattccggaataaaccaactcgcccataaaaatcagtctctaaatcacgcgaaatgacaccggctgcttggaacgtttcaacgaccggaatgtgggtttcagccactaaattgcgaatcgctgctgtcacttctggtgaagaagcgcgcataccaactaaaagtactggtaattttgcttctttaatccgttgtgccaaaagcgtcgtttcaacgggactggctggccctaatttaggcgccattagcggtttaatcactttagaatgaacttctgagtccgtgacatcttgtgggatgctgacaaacgttgcgccctgtttagcggattcagcttcttgataggcgttagcaatcacttctgataaattctcaggttcttggacttccgcactgaattttgtgattggtgcgaataaagcggcattacgcatgctttgatgcgttagtcgcaacaaatcagcgcgtttcacttgaccggcaatggctaagactggatcaccttctgccgttgctgtcacgacccccgtcgctaaattactggcaccagggcctgaagtcgccattacaacgcctggtttgcccgtaatccgaccaatcccagccgccatgaaggctgcattttgttcatggcgcgtcaaaattaatttgggcgtctttggattaacgggatgttctagtcgttcaaaaacccgatcaatcttcgcacccggaatcccgaacacgtactcaacatcatgatttactaaactatcgatgatggcatccgcgccgtaatacttcttttcttcagtcatgacttaccctacctaacctatgattttataacttatatcttagcatggaactactggaaaaactagcagagtgcgtttagaatgcgttacccgcctacagccagtttactaaaaaaacgcactcaccatcttggtaagtgcgtttttttaatcattcattaacgaacagtaatttcataacttgcattaaacgtttcacctgcagccagttcgttgacaccaaatttttctgaaagttcaccgcttgcgtcaacggtatccgcaatcccccaccaaggttcaaggcacacaaggttgccttctgttggataaggtgaccaaacaccgatgaatggggcgccagccaatttcatggtcactgagtggtccgttttttcagaacgaatactgaattcattggcttgaccctttaattcgtagattaaggcgtcatttttaaataattggtgattgatatccgttgcgacgtcggttggtgctaacgtccggtcgttcaaattaatgaaggccccttgcaatgggatcttaacccgtgatttttgtgggcggtagtctaagaaataatcttcaaattgcgtgtcatccgttaatgggactttaaatcctggatgacccccaattgagaagtacattggcccgcttggcgcaacattgcggacgtcatagccaaccgtcaaatgcatatcatgaacacgatagctcacacgtaattcaaattcaaatggatacacggcccggctgtcagcgtctgctttcaacaagaaagtcacggcgtggtccgattgttcttcgatactgaattcgcgatcacgtgcaaaaccgtgttgacccatcggataggtttggccattatacgtatattggtctgcttttgaacgccccacgaatgggaataaaacgggtgcgtgccggccccaaacatcgggatcagcttgccataaatattcaagccccgaaacggcgcccttaatactttgtaattcggcgccttttggactgagggtcaccgttaaaaattcgtttgcaatttggatcatcttaaaataccaccttttaaaaattatagaataaagcgggttaaatctttatcggctgcaatattaccgatcttatcgttgacatattgttctgtgatggtgatatcccccatctgcatgtcaggaccttcaaagagaatatcctctaatagcttctctaagatggtggccaaacgacgcgcaccaatattatcggtatcatggttaacttggaaggcaatcgcagcaatgcggccaattgcttccatcgtgaaggtgacgtgcaccccatcggcgccaatcaacgccatgtattgttttacaagtgcgttgtttggttccgttaaaattcggatgaagtctttttcagttaaatcttcaagttcaacccggattgggaaccgtccttgtaattcagcgattaaatcgctgggttttgattcagcaaacgcccctgaaccgataaataagatatggtcggtcttcaaaacaccgtatttcgtattgacttgtgagccttcaacgattggtaaaatatcacgttgaaccccttcacgagagacttcaccagattgttttttgccaccagccgtaattttatcaatttcatcgataaaaataatcccggtattttcagcacgttggagcgcatcatggtaaatatcggcatggttgactaatttagcggattcttcttgaatgaaaacttcacgcgcttctttaaccgttaccgtccgcgtaatttttttcttcggcataattgaacccagagtatcgtttaaatcaattcccatctggcccatcatatcgttcattggggcaacttttttcggttcatcaacttgaatttcgatttcccggtcatctaacaagcctttatctaactgttctttaacagataaccgttcgttacggatatcatccgtcacttcttctggttcagtttgtccgaaaccagctggtgtttcccctttttgaagcgcgttaaacatgttcattaaatcattcatgttgttattgttcttacgttgttcctttttaatgcccggtactagtagtttaaccaagcgcttgtctgcttgacgagcagccttagcacgaacgtttttaaattgttctgtttcttccatatgcacagccacatcagctaagtcgcggaccattgattcaacgtcacgtcccacataccccacttcggtaaatttagtggcttcaaccttgataaatggggcatcgacaactttcgctaaccgtcgggcaatttctgttttcccgaccccagttggcccgatcattaatagatttttaggcgtgatttcttgttgcatttttgcactgagttgcatccggcgataacggttgtatagtgcaaccgcaacggcttttttagcttgatcttggccaatgacaaattgatcaagttcggcaacgattgttttgggtgttttattcattaagtccattgtgcgacctcctaaaatgattcgacaatcacgttgtggttggtgtaaacatcgattccaccagcaatatcaacactggttgtgacgattttttcaacggataagtcatcttttccttcaagtaataatgcggtagctgctgcttgggcgaaattgccgcctgaacccacggcaatcacttgatcacctgattccgatagcgtatcaggggtgatgacttcaccattccctgaaattaataaaatatcagtcgcattgaccgcaatcaacatcgcttctaatttttgaagcgttggatctttacgccagtcttgcgctaaagcaacagcagcatgttgcaggtcgcctgaatacttttctaatttttgttcaaaccattcttgtagcgtaaaggcatctgcaacaccaccagcaaagccgattgcgacttgattaccataaattcgacggacctttttagcagaatccttcgtcacaaatttttcgcccatggtgacttgaccgtcaccggcgatagctgttttaccattatgtttaactgcacaaattgttgtcatatgaattactcctaacgttgtttggggattgggcggggcttaacgtgcttttcaaactaactttctgcgcttagcgctgtgaatcaaatcagcgactttatcgctaattcgcttccctgtgatagtgctcaaaagttgaacaagcttgaaagcacttacttttttcttaacgtgctttcatcaactgctttctacgctttgctacatctgtcatatcaccggcgttgccggtaatccgcctgattaggcaaatgctcaaaaacaacccgttgatgacgcacttctttcttaacgtgcttttcaaaccatgttcttgcgtttagctacacaagtcaaacaattgcttccagtaatcattcgccttgttaggctaattctcagaacataaccggtttgaacgcacttctattttagcagtctttaagactgtgtgctaatattagtctatttttcgttgaaaaaaatcaaactttagtccgagttttacgcgcggggaaagaattggcggtaatctttttgtaaatgggctgtggtgacatgggtgtaaatctgtgtggttgataaactactgtggcctaataattcctgcaccgttcgcagatcagcaccgtgatccaataagtgagttgcaaaggtatgccgaatcatatgcggatgaatgtcactcgttaaacttgttttcttgataatctgatctaaaatgtattcaattccccgacttgtaattggcgctccgagatgattaacaaaaacgacatcgtggtccaattgttttttggccatcaattgaacacgaccaacttttaaataagcttgcaaggcacgtccagcatggtgcccgaatggtacatagcgatctttattgccctttccatgaacaagaatgacgcgtaagccgaaatcaatttgtgctaccgtcaactgcgcgcactcactcacccgcatccccgtcgcatacagtaattctaagatggcgcgattccgttgatcgagtggttgatccccatcaatggcagcaaatagcgcgtccatttccttttcgtaaaaaaaccgcggcagcttatgctgttgcttttttaattgaacagcttcaaaaggatcggtttgcacgaactcatttttcactaaataccggtaaaacgaccgcaaactcgaaattcgccgcgcgacagtttcatgactatattctttttgatccatttcattcaagtaagtttgcacgtccagtggcgtgacctgtttaaacgacgctaagccgccgttagcggttaaaaaagcactgaacatctgaatatcagcttgataagctttttgggtttctggcgagtaatgccgatcgaccactaagtactgtaaaaaaagattaagccattcttgttctaacgccaaaaaaatccctccaagcttgattagtattactttaccacaagcctggcgggatttaaaagattctaattaaagtgtcgtcttaaattggtcgatactttcaagtgcgcgatcagcaagtgcttggttccgttcctttttatcgcgaatccgttgtttcaaaggttcgaaaatcccaaagttcgcattcatcggttggaaatgtttagcactcgtatgggtaatatagtgcgccattgatcccatcgccgtatccgttgggaaaacagccggtgtttggtccaacgccagtttagcggcgttaatcccagccactagtccagaagcggcactttcaacgtagccttcaaccccagtcatttgaccagcgaagaatagatcgtcacgttgttttgattgataggttggtaataaaacatctggtgatttcatgaaagtattgcgatgcatcacaccataccgcacaaattcagcattttccaaaccaggaatcatgcggaaaacccgtttttgttcgccccacttcaaatgtgtttggaaaccaacaatgttgtacaaactagcagccgcattgtcttggcgcaattgcacaacggcgtatggttgtttgccagtattcggatcttccaatccaacgggtttcaaaggcccgaataacatcgtcttaatcccgcgtttggccatcacttcgattggcatacagccatcaaagaacttttctccttcaaagtcatgcatttctgcaacttcagcgctaatcaaggctttgtagaagttttcgaattcttcttcagtcattggacagtttaagtaagcagcttcgcccttatcataccgtgatttgaggtaaactttatcgaaatcgatactgttcttatccaaaatgggcgctgcagcatcgtagaaatacaagccatcactgccgtttaaggcactgattttttcagctaagccttcggacgttaatggaccagtggccacaatcgtaggaccttctggaaaatcggttaattcttcatgatgaactgtgacacgttcatgattggctaagcgatccgtcaccgtttgtgaaaacggtgtgcggtcaacggccaatgcgccaccagcaggaacggcattttgatcagccgcactgatgattaatgagtccaagtgacgcatttcttctttaattaagccaaccgcattggtaatttggttcgcacggagcgaattcgtacacactaattctgcgaattgttctgtatggtgcgccggtgtcattttaacgggacgcatttcatagaggtgcacattcacaccgcgttgggcaatttgccatgctgcttctgaaccggctaatccggcaccaatcacgtttacaaaaggttctgtgctcatttgctagtctccatttttctaattatttttggacggtttcttcgtagtcaccgtttggacaaattacttgtttgccacctttaattttcttttcaacaaggtagtgttcacacttcggacagtttctgccgacgggtttatcccatgtgacaaaatcacaatctgggtaacgatcacaaccgtaaaataagcgattcttcttcgatttacgttcgatgacttgccccttaccacatttgggacaggtgacgccgatttccttcacgattgccttggtattgcgacaatctgggaagcgactgcaagcgaagaatttaccataacgacccattttaacaaccattggggcaccacagatgtcgcagtcaaagccagctggttcatctttaatttgtactttttcgatttgttcactcgctttttcgacttctttttcaaacggtttgaagaagttgtcaatcaccttgacccagtcttctttacccgtttcgacttcatccaaacgatgttccaaatcggccgtaaagtcgatgttaacgatgtccgggaagaattcgacaattaaaccattgacgatttcccctaactcagttggttcaaagcgttttgcgtttaacttcacgtaataacgccgttgaatcgtttcgatcgttggtgaatacgttgatggtcgaccaacaccgttttcttccaaagccttaactaaattggcttcagaataacgtgctggtggctgcgtaaaatgttgcgctggatcagttttaacgagtttcaccgcatccccaactgcaagttctggtaagacattatccttagcagagtcttcagtatcacgtgatgacacatagagtttcgtgaatcctgggaacttcatttgtgagccgtttgccttgaataagacatcaccttgagcaatcttaactgcgaccgtatcaaaaatggctggtgtcatctgactggcgacaaaccgtgaccagattaagttatagattttatattgatcgttagttaaaacgtctttcaagctcttaggtgtccgcatcactgacgttgggcgaatcgcttcatgggcatcttgtgcaccttcaggattcttcgtcttatgcgcctttaatgccgcatattcttcaccataattgtcatggatgaattgtgacgcttcatgtttagcaccggtagaaatccgggttgaatcggtacgcatataagtgattaacccgaccgtgccttctttgccaccaaggttaatcccttcatacaattgttgggcttgcatcattgttttccgcgttctgaagttcaacttacggttggcttcttgttgcaaggaactcgttgtaaatggtgcggctgcaaaacgtttgcgttcccgtttcttaacatcttcaatcgtgaaatccttagtcttatcgatttgtttcaaaatcgcttgaaccgcatcattatcgctaaggggtaatttcttacccttcacgccgtagaaactggcgttaaacttactgcgactctttttaaattccgcatccaatgaccagtattcttctggaacaaaggctttaatctcgttttcacgatcaatcacgagttttaacgcaacggattgaacccgaccagcactcaagccttttttaaccttttgccagagtaatggactgattgaatacccgacaatccgatcaagcacgcgtcgcgcttgttgtgcatcaacgagtttcatatcgatactacgtggatttttaaaagcacttttaacggtgtctttggtaatttcgttaaagacaacccggtttttttcagttggatcgagttttaaaatatgggaaacatgccatgcaatcgcttcgccttcgcgatccggatcggctgcgagatagatatgatcaacttttttagcttgcttttttaattctttaatcgtttcgcctttaccgcgaatcgagatatatttaggttcataattattttcaaaatcaacacccatttgactctttggtaaatcgcggatgtgacccttgcttgcaacaaccttatagttgcgcccaaggtacttttcaattgttttggcctttgcaggtgattctacaatgactaaatttttgcctgccatggacaaacccctttcaacagaacgctttgttcaaatcgttcattagcataaaacactaccttgacgattgtcaactgatagtatgcttgatattaacagcttaaagcatagcataggtttggcagtatgccaaagagaaattgttttcaaacgtacaaatcacaccaaaaatcggggttcaaccacttggtcgaaccccgatttcttctattatatagtcgccagataaaaaacttagactgacaaactatttttttgtgcatcgcgttcaagaatccccgcaataatttgatcaagggtgatggttgccatctccgcttccgcagctttttgcacctgatcataagccgcatcaagggttgcttgaatgttgctaccaattaaacaatctggatttgttttttcatcaacgtgtaataaccgttgatctgtatcaagcgcctgaaaaacggctaacattgtaatctgttccgctgggcgcgctaatttaggggcaatcgtccccggtttagtcgctaataaatccgccttcaccagtagtgacattagccgccgcactaaactaggattagactcgatgctcccagcaatcgcttggcttgataaatcaccatcttgaaaaatatcgacataggccaaaatatggatggcatcactaagtttatgagaatatttcatggttcaaccgcctttttgaaatcaattcaggcttatttaataatcgtctgtaacgcttcttttaatgaaggtaatggtcggcctaagacatcgggtaaatcagaagtggtttcatctaaatcaccatcttgaatcattgtttgaataccagtgacaatttcagcgacttcagcaggtaagccgttgtcttcgaggctttgacgataatcagccgcatctaatgatactaccttaaattcttgattagtcaactcgctaatcgcttgagctaaatccgcataagtggctggcgcaccggaaaattcataaatcgcttttggttgatcgttgactaataccttagccgcagcttcagcatagtcgtgttcgagtgcccaaccaacatgcccttcaccagcgccataaacaaatggttgacctgctaatgcgcctttaatgctatccatttcgttttcaagataccagttattgcgtaagaatgtatgatcaatgcctgatgctgccaatgctttttcagtttgaatgtgatcacttgctaaagcacctgttgcttgatcagcgtgtgggaaactcgtataagcaatccacttaacgccagcctttttagcagcttcaatcacgtttaaatgttgttgcgcacggggcacatcgccaccaggttgtgaggagatgaataataaccggtcaacgcctttgagtgattccgttaatgtggcaacatcgttatagtcaccgggacgaacggtcacaccagctgggaccattttagtggctttttcagtattccgtgctaatccaatgatttgttctgctggcactaagtcagccaacgtcttcattgcgacttgcccaaaacgacctgtcactgctgtaattgcatatttcatattaaaaatcccctttgaattccatttgttactttataagtaacttgtgactttaatattaacaacatgccgcagaattgtcaacaattaaccctcaatcaaaataatgcaactcgtccaataacaattgttgatttaaaagcggtgttgcaccggctaaaatcagttgattacagcctgccgataatgaatgattaacctggcccggtaaggcatatacgttacgattggcttgtaatgctaaattagcggtgattaagctaccacttttttggcgggcttctgtgaccactaaactatgacaaagtccggcaataatccgatttcgggctgggaagtggtgcttcttagccgttacgtccaaaccgtattctgatatcaataaccctttttcagcgaccgcctgttgcaagtgttcgttttgtggtgggtaataacaattcaagcccgttccaatcacgccaatcggtcgtaaccctttttggagtgcaacttcatgcgccatcgcatccgccccttgagctaaaccactgataatcgtcgttgtttgtggtaatcccaataaatgctgcagggcttgcttagtatactccgtggcttgccgcgcaccaaccaccgcaacacatggctgtttcaaaacacttaaatcgccgcgataaaataaaactgttggcggacaatgggtttctaacaaccgttgcggataatctgcttctagaatcgtcagatactgaacataacgttcatgcgtggcacacttctgttgcagagctagactgtcaaaactagtctgaaaggtcagccaatatcgctccggtaaacacgcaatctgcgcaatctccaatgccgataaagcccaattgtgactcgttactaaccatgcggctaagcgtaattcactgatggggccaaacccatctgccaggtgtactttcaataataattgctttttagtcaacacaaaaaaacagctcctttacgtttatcttcgtaaaggagctgttttattttctatagggcgtctttaacgggcgaaaaactgcggcggtgaattggcgtaacaccgaattcagctaaaccagcgagatgtttcgctgtcccgtaacccatattattagcaagatcgtaacccggatactgttgatcataattaatcatcaattgatcccgaatcactttagccacaatactggctgaggcgatactaatactgcgcgcatcccccttaatcaatttttcttgtgggatgtctgtcggcacggtcattgcgtccaccaataggtaatcggggtgttctgctaaaccagcgacagcttcgcccatcgccagttccgtagcgtgatagatattctcttggtcgatccgtggtgcatcggcaatcccaatgctgacactgatggcttgtgccatgataccgcgatacagttcttgtttcaccttaaacgaaagctgtttagagtcgttgacttgccataggtcaaaatcatgtggcaaaatgacggccgctgtcacaactggacccgctaatgggccgcgcccaacttcatcaattccagcaatcaagggataatctggccataaactttcttctagctggcgtcgttcgataaacgccgctttttgcgccgctaacttagccatccgcttgtcatattgaacgagtaacttctgcacgccagcacgcgcatcactgcgtaagagcgccacttcttcctctgaaatgtcgtctaataagcgtgccttaatggcagcaattgattctggtttggtcattagtgcgcctccacaggaacgatatcgagtgtaaagcgccctaacttacccttacgcgcgtccgtgatgaatttcatacagaagcgatcgtagtcttctttaaaacctagtcgtttggtcaatgccatgattaaatcaggcgctggcatttcaagttcagccggcgtcacatggtattcttttaccaattgttgcggatagaaatccttgaaataatcgagggcatacaccacaacatcatccgggtgataaattgcatccgaaatcgcaccagttaaggccaacttattgccgacagctggatcttcgaatttaggccataaaacccctggtgtatctaacaattcgagtgattggcccgcttttaaccattgttgattcttggttacaccgggtcgattacctgttaccgcaatgtttttttgcaccaagcgattcaaaatcgttgatttaccaacgttaggaaccccaacacacattgcacggatcaccggattaagaatcccttttgcccgttttttagcaagtttgtctgccaaaatttcttgtgctactttttcgatttgcggtaattttgatttatgttgcgcatcaagcgcgattgctgtaatcccccgttttttaaatgtttcaatccattgttgtgtgcgtttggcatctgccatatccgctttgttcataatcaagagcgtcggtttgttttgaccaagttctgcaatcatcggattaatggaagattctggaacccgtgcatccacgatttcgagaatcaaatcgactgctttgagccgttctttaatttgcttttgggcctttgccatatggcctggataccattgaattgtcataataactcctttattgctagttaagcgatatacatcattcttaatatttgtcactgattgtattattcttaattctatcatacctgatgtctggctgacgggttaaatttaattccggactacaacatccaccaattaagcgtatcattttttcagttaagcatcatattcagtacatttcatacgatcattagcactcgataatcaaaaaagctgacacactctagagtatgtcagcttttaattattattttaaagattgtatatctttaatcggccagtagaccgccactgctcggcctaatattgtatcgcggtggatcgtaccaaacaagcggctatctttgctgatctggcgattgtcacccaatacaaagtactcatcttttggaatctgcttttcgccgattaaggtttttaattcaaaatctgatgttaaaatccctggtttctttttggcctgattcaagaatggttcgtcgacatgccgtccattgatgtacagctggtcattgcggtatgcaacggtttcacctggcagaccaatcacccgtttcacataagttgtttgatcagctcgggtgaagacaacaacatcaaagcgcttgatgtgcccactagtgcgtaataagagttggtccgctgactcaagcgtcggggccatcgattgccctgacaccgatgcggggaccagaatgaacgaccgtaacacaatcgctaccgtcccagccagtaaaaatgcgagaagccaatagccggtaatggcccatccccgccacaatttctgcttcggggaagtcattaggcttgttcgctttcctgataggcttcatacgcctcatcaaaaatcgtcatactcgggaggtagctgccattaagttccaaatagcgcgttaatgtttcataatcgccgctttgtttagggaaagattggtcaaaaaaggcattgttggcaaattggggaactggttcataattattcggatcacgttgggtcatgaggtaacgataaaaactctgcttcatctgaacaccttatttcttattttttagcgggatatagacgtttaaatcaatcttatcattcttcaaatcgatatgtttagcagttacttgcatcccgttttcgagcttgaactcatttaggcgtaatgtaatccggctcttgtgtgcatccaaaataacccatttggggaatttgtattgacgcttgatgtaattaaagacaaacgacatgggcaccttcaattgtccgactgctaattgtttggcgcgtaattggacgtcgccattttctaaaacgtacggttcaaaaaagaggttgaattcgaccggaaaccctaagaacttgaattgaccagataaaatcgcctgctgatccagggtgagttggtatttaatctttgaatcttccaagtagttttgtaaataataggtgactaaactattgatttgtctcttatgcatctgaatttcaaaagtgctatcagctttgatgattttctcagttttaatcatttcagtcttaggggctgtcacgttatagccgacaagaccaactgtcccgatcacgactgctaataagacgatgaaactgtatttccaataattgatggtccgtttagttgttgttttctgtgctgcttgatgtgcttgtctggttgtcataacctatcctttctctaatcccacgtttgcttgtgtgctttcatcacttgccaaaaggcctttgtgacccattgataacctttatgattgggatggaaatgatcatctggactgatataggggttcaaatgctcgttagccgctaatgttttttgcaactgtgcactatccattttagcgagcgatttagtctgtttgacaaaatgcccatcgccccgtgtcaacatccgatcactattgacataatacgtatctttgaaatcattagcaaccgttttggcggtctgattccactcagcaaccgcctttgacatcccagtgatttcagggaaatagacataaaacggattgtagacccccatgatgaaaattggggcatcaggattatattttctaatttgcatcatcagcgtggttaaattcgcttgatatttttgctgaccagtcgtaatccgacgttgattcagctcaaaaaaattattctgtaaaactgccattaggtcgttgcccccaacagttagcgtcacaatatcagcttttgccaattgctgctgtagcggcttttgtttctgcacgcgtttagtaatctgtacactggtatcgcccgtcacaccgaaattggcggtcttgacgggatgcttggttgcttgctgaatctgattggcaactaatgacacatagccttctttgttggtctcatcaccaacaccatgcgtcaatgaatcgccaatcgcaaccaactgcaacgtcttttttggttttggttttgatttgatcactttatccgctgaagacgttgatgttaccgtcttaggcgcttggttgggccgtggcgttaatagttgccagataataaagaccactaaaatcgcaccagcaaataagcctaaatcaattaaaatctgtcgtgctttcttcaaacgtgacacctcggttatttctagataatagttaaggctgggacaattaaatgtcaaccagccttagtgtgttaatacattaattgtaatcttgttaatcctctgtgtagtacataacggcaaatgcgcctgcacccgcatgcgttgcaatcactggatcagttgtccggacaagaatttcgatgtttgggaatactacttgcaattgtgctttaattttttcgctcaattctagcccatccgcatgtgaaatcccgattgcccgaatctttaagtcgcgcatatcagcttccatttcatcgatgaatttcgtaatggtcttcatcccccggcctttgcgtaacacttttaattcgctatcagccacttcaaggatcaccttgatatttaataaacttgaaatcacaccagccgcatgactcaaccggccccccttaacgaggttggttagatcagtcacacccatgtataacttcgtatgatcgtgtacgttttgaatggctactaaagcatcatccatgctaccgccgttttcaatgacttctgccgcttttaacacttggaatgccattgcacggtcggtaaagtcgctatcgacaactgttacatctgctttcgccatctcgccggcttggcgggctgtatcaacagtgccactaattgctcgtagcatgtgaattgataaaatctggctgccatcagccgctaattgttcatacgtttcgacaaaattcccgattgcgggttgactcgtcttaggtaaggcactcgcacttgccatttcagtcataaattgatcgcgggtaatggtttcaccatcgatatacaccgtattgtcaatcataatcgtcaacggaataaccgtaatatgatgttctttaatttcttcaggagtgagttggatggatgaatccgttacaattttaatattagccactattacttcagccacgctttctatcttgaaatctgggcaatcaacggccccgtgatttctatgattatgtctattgacagtatatcaaacaatcacgcttttttcaccaaaagttactgattaaaaaaaaagccagttgtcacttttgtagcaagcaaaaaggcggttacatcgctgcgaccgcccttaattgaatctttctaacggcgttgatagatttcaaacgtatgcgcatagcgattacgttcgtccaccacaccaggtgtttgactgatcaattcgaactgatccatcgctaattttggcatataaacgttgccttcaaacgattcagcaatttttgtaacgtacagataatcgacatcatcggcgtacattgcaaaaatatcggcaccaccaatgataaaaatctttttcatcgggttggcttgctcatatttaagcagttccgctttggtgtgcatcacaaacaccccatcagccacagctaaatccggttgtcgcgtaatcacaatgttttggcgtccaggtaagggttggacgggtaaactatcatacgttttccggcccattaccaccacttcatgaaccgtttcgtgtttaaaattggcaagatcgttgggtaatgaccatggtaagtgaccattttgaccgattaacccattttgatcttcagcccataagaatgctaacattggcgctcctcctcattaaaccgcaacgggtgctttaattgcgggttctgcttcatagttttcaagtttaatatcggcgacatcaaaatcaaagatgcttgttttatctggattgagccacaattttggtgcggcatgaattgggcgttgaagctgtgtcttcacctgttcaatatgattactgtaaatatgggcatcacccaacgtatggatgaattcaccgacttcaaggccggtttcatgcgcaatcaaatgtgtcaatagtgcgtagctcgcaatgttaaatggtacgccaaggaaaacatccccgctgcgttgatacaattggcacgataaccgtccgtcattaacgtagaactggaacatcgtatgacaaggcggcaacaccatacttggcacgtcttctggattccaagctgagacaattaagcgccgtgaatcgggattggttttaatttgttcaatcacgtttttaatctgatcgattgtgtccccagaacgggtttgccaagcacgccattgtttaccatagatatcgcccagttcaccatattgtttggcaaaggcttcatcgtctaaaatccgttcgttaaactgttgcatttggtcgcgataaacagtattgaaggccgcatcagtttgggcacgatgaccaaaatctgtcatatccgggcctgtgtaatcggcactttgaacgtaacgttcaaacgcccattcatcccaaatatgattattgtgttgtagtaagtaacgaatattggaatcaccttttaaaaaccacaataactcacttttaattaacccgaatggcacttttttggtggttaataaaggaaacccttcgtttaaatcaaagcgcatttgatagccaaacagactataggtgccagtgttggtacgatcttctttataatgacccgtttctaaaatggtacgttctaaatctaagtaggtttgctcagacatgatgtggattcctttctttaacgtgcttttcaagctaactttctgcacttagcgacgtatgccaaataatcgactttgtcgcttattcgtcacactaagctaatgcttaaaagttgaacaagcttgaacgcacttcttttaacgtgctttttgaagctggcgcttgcgcttaacgacatttgtcaaatcagcgattacatcgctaattcgccaaattaagttaatgctcagcgtcaaaccgtttcaaacgcactcagttttttaacgtgcttttaaaaccatgttcttgcgtttagctacacaagtcaaacgattgctttcagcaatcattcgccttgttaggctagtgctcggaatatacccggtttgaacgcactcatttagtttgcgtattcacttaagtattcccagcgggtcattttttcgtctagttgttggttaagttgatccatttgggcctgccactctgctaatttaccatagtccgcgccgtttgcgttcatttctgctttgatggtttcaatctgttcgtccaattgttccatgtcggcttcgatgtgttcgtattccttttgttcggcgtatgttaatttctgcttggtctttgcaactggtgcttcttcaaccgatgctgtcgctgctttaggcgctgacttagttggtgttgctttttgttttgccaagtaatcgctgaacaggccaacttcggtgctaatcttgccggccccttcaaaaatcaagagtttgtcggcaacttgatcgaggaagtaacggtcatgcgaaactgtgatcacagtcccgttaaagttttccaagtaattttccagaatcgtcaacgtgccaatatctaaatcgttagttggttcatccagtaataagacgtttggttgttgcatcaaaattttcaacaagtacaagcggcgtttttcaccaccagaaagtttgccaatcaatgtgccgtgcatttgacggctgaataggaattgttctaacaattgtgtgacactgatccggtccccatttttaccaatgacttcttcgccggcttcttgcaagtatgcaatcactcgtttgttaggatctaagtcttcattttgttgcgtatagtagccgaggttgacggtttcgccgacaattaactcgccactatcaagtgggaggcgttcagccaacacgtttaacagtgatgatttaccggccccgttgacgccactaatcccaatccgatcattcgcttgaactagaatactaaagtcatccaaaatctgacgatcgccgagttttaaactggcgttctttaattcgagtacttttttacctaaccgcgattgccccatctgaatatcgacttccgaatcgtctggtccagtggttaaattcgcctttaagtcattgaagcgattaatccgcgcttgttgcttggttgttcgtgccttagcacccgcgcgcatccacgttaattcttgcttgtagagttgttgttgcttatgggcagcttgttgttcacgttccaagcgatcagctttttgggttaaaaattgttcatagttaccgttatatgaatagagttgaccaccgtcgagttcaaaaatttggttcgcaacacgatccaagaagtagcgatcatgcgtgacaattaaaagcgcgccttgatattgtgctaagcgtttttcaagccattcaatggaatcaaaatccaagtggttcgttggttcgtccaaaatcaataagtctgggctttcaattaaggcttgtgccaacccaacccgtttttgttggcccccagataatgtattaatcggttgatccaaatccgttagatgtaattgcgtcaaaatcgtcttgatatccgtatcaaccgtccaagcatcttgttgcgtcatttgcgcatcagcttgttcgtattgcgtctgtaacttcggattagtgggatcttgcgtatatgccgccaagacgcgttcatagttttgaatcgtcttgaaaaccggattatcgccggcaaaaatcgccgccataatacttaagttcgtatcaaagcttggtttctgggctaaataactcatcgcgtattggttaggcgtttcaacctgcccgctatcgtatgaatccgtgccggtaatcgcgttgagtaacgtcgttttcccggtcccattaatgccgactaaaccaatgcggtccccttcacggattaaaaatgaaatgtcttcaaaaagcgttttttcgccgtaagtcttcgttaaatgcgttgctgtcaatgtttgcaatatagtcacctttttactttcgttaccatcaatcatagcgaataatcagacgactgacaatcaaaatgacaaaaagaatgtcgtaaactgtaaacaaataaaaaaagcccctgacaacgatcaatattgtcaggagctaacgtttaaatttcagggtacatatctgcaattgtgtgttctgcatcaatcacaatgtacaaccgaccatttttttgtgagatttggctactttgataaatattatctaagccactattatctttattcttgaatgggaaataaatttgcattggtgcgcgatcttgatcatcttcaaagattaaatcgagtttttcgatgtcttgatacttcgttgcacgaccgaacatccccatttcaagagaaccggtgttgatgtcttcggacttcacatgatccgcttcaggtaagatttcggctttgaaactcttgcaagggtgaatctcttgcattgggccaccattaatgcgaccataactggtggtaacacggctaatccaaatatcatttaattctttgtggctgacggtccaagcgtcaccatttctaaaataaaatttcaattccttaaaaacatgttgtgtcatcaattgtcaccctttctgaatgtgcttacatggttattttaacacaccttctgagggaatggcttagttttgtgcagccgattgcaataattgggcttgatcgtttggtaattgatctaacaccacggctttttcgagttgcgccaacatttttcctagttgcggaccaggttgatacccattttgcattaagacttgtccattgatggcgagttccgccttttgcttgatttgcagtgccgcatactttgcttgccactgatcaactgcgactgattcgttggtcattaattgggcaacaattaacgtgatgtctaatacatgttgccccgcttgataaagggcccactgatcggctgattggtctagaatggctggcaataatcccaaacctgctttaaccgcatcgatcacatcgttagcactcttccagcgtttcaataatttgccggcggcggcgggggttttacccaataatgcattgactagtagccaagccgtatcttcatcatgaatctgttgcgctggtaatgccgctaatttggtcagtcccgctgcttcagtcgcgaacgctggacaatattgatacaacccggtttttaaaaaggtttgtaacccattttgccgctgaatcccttgtagcaacttcacaaattcgacatgaatgcgttccaccgcaattttcgttaatagttcagcatgtttggcaatcgcagtttgtgtttctggtgtaactgcaaagccgagttgactttcaaaacggacggcacgcatcatacggagtgcatcttcgtggaaacgttcgtcggctttgcccaccgctctgatttgttgcgcttttagatcggtcaggccatcgaataaatcaataatttcaccatcagcgcgcatcgcaagcgcattaatcgtgaaatcccgccgttgtaaatcttcgtctaacgaccgcacaaacgtcactgaatcaggccgtctaaaatcttgatagccactttccgttctaaaagtggtcacttcatagccagtcccatgatcaagaatcatcacagtcccgtgctggattccggtatcgaccgttcgtttaaaaatttgcttcacttctgctggatacgccgacgttgcgatatcaacgtcgtgaatcggcaagcctaataaataatcgcggacactgccgccgacgaaataggcttcaaaacccgccgcttcaatttgttttaagattggtagggccgcttcaaaatccggcgcaaaggtggttactttcatggctatccctcttatctaacaattaactgtttctgatgctatttatcataccacaatcaaggaccccacttcagccaccaaagtggttccaactgtttttaacccccattccgtgctatatttgagttatgtaaagggggcgttgacatgacgaaacaacatacttggcaaacgactagtcgtgatttagcggtgattgcgctgggctgtgcgatctacgcgtttgggctagtgaccatcaacattcaaaatcacctggctgaaggtggcttaaccgggattaccttgattttacggtattggttgcatatcgacccggcgtattcaacggctttgttaaatatcccgctaattattctaggctatcgttacctcggtaaacgcgcactcgcctacacgatttacggaacggcgatgatgtccgtttttctatggatttggcaacgtgtccccatcacaattgatttaaaccacgatattttaatcgccgctattctagccggtttatgtagtggcttcggcagtgggattatctaccgcttcggtggcacaactggtggcaccgacgtcattgcccgcattatcgaaaaagaaaaagggatgccaatgggccgctccctccttctttttgacgtcgtagtcttaacactctcactcagttacctcgatatcgaacatatgatgtataccttaattgcgtcttacgtcttctcccggattgtgaacttcacactcgagggtgcttacgccgccaaagggctactcgtaatcagtgaccacgcgcaagcaattgccgatgacattctggccgatatggaacgcggcgtgacgtttctacaggccacaggcgcttatgcccatcaagaccgaccaatgctgtactgtgtcgtcagtccaagtgaaatcgcctatcttaaacggttgattaaccaacatgacccgcacgcattcgtttccattattgatgtgcacgaagcactcggggaaggctttacgtacgactaatcaataaaaacgccagcgattaatcgctggcgtttttaagtgtctttatgataattcctgtccctcagttaactcaatttctttttcaacttcttcaaccgtcacaaaatatttttgattgcgcagaacaaagaaaatcccaattaaaatcattaagctcgcaaaataaaaagtccaatgcgctgaccatttctcagcgattttaccagcaacaaatggtgcgattgccccgccagtaaagcgaataaagctatacgccgatgatgcaacactgcgttcaatcgaatcattttccatcgcaaccgtcgttaacaacgtattcaccaagccttggaagaaaccagcaatgatgacgccaaaggccactaaggctggttgatctgcataaataccgatcaccattaagtagatcaagaaaaagcttaacccaaacaacaacgtcacaagggtattcgttttttgttccatccgtggtgcaatgaaaaccgatgcaatggctaacatcacgccccacccgaaaaagacaaaaccaacttgcaattcagttaacccaactaataagaatggtgcatacgctaaaatcgtgaaaaacccgaaattatacaataatgcaataatcccgattgaacgtaaacgatgattttttaacgcgacagcccctgcaaaaaaaggcgcccttttagcaggtttagcaatcggttctaatgaaaccatgatggtcaacgccgcaataaacatcaaaatggcgacaccataaaacggaaaacgccatgaaagactccctaagacgccacccacaagtggtccaacggccatcccaattcctaaagatccttcgtataacataatcgcttgttccgttttttcaggcatcacactgacaatcgcagtcaaagcggttgataggaacaaggcgttcccaaagccccaaccggcccgtagcgaaattaattgcgtaatggtctgtgaacgaccagctaacgccgcaaataaaacaataatgatcaaaccaatactaatcgtttttttcgcaccaattctagtggaaataaaccctgtaaatagcataataatccctgtgaccaacatataactcgtaaatagtaaggtcgtttgcgctggtgtggcatttaatttaaccgcaatcgtttttaaaatgggatcaactaaaccaatccccataaatgcaaccacacacgtaaatgcaacggcatacgccgagcgtagccctttattttgattctccagcaacatatcactctctttctctttatataaactacattagattgcaaaacatatcaatttttacattaaaatttgacataatatagtgacatgtttgttgactctaaatatggtatactgagcaataattaatcgattaaagggtgaaataatatgagtacgcttagctatattttattatgtatgttagttcgcaaaccgtgtagcggctacgaattaaagcagtacattaatttattttgggaagcacaccacagtcaaatctacacggcattaaataaactgcacgaacaaggctatgtcacggttaaaattgatcccgttcataaacaaaagaagatttatcatttaacagaagccggccaactcgtcgttactgactggtttcaagaagaaacgaatttacccacacaacgtgacgagtttttagcaaaagtttacgttatttcactgttcaatcaagaacaagcagctgacttactccaagatcgccgccatcattaccaaaaaattcaaaaacaataccaacataagatgcaagaatacaacctcataaccgatcccaccgaaaagcaaaaaaacttaggtcgttacctgattttgaaacggcgcttaatggtctgcgcaacagaattagaatggtgcgcgtgggcgcaggacattcttaaccgcaatcaaaaccaataaaaaagacagctaatgcacttaaaaatgcactagctgtcttttttatgctttagttaaacatttcccacaataaacacgagctaaattaactatcgttagcaggcaaagcatactaacggccattaaaaacggtccagcgagcaaagccgccattgagatgggtgcttggtacaaaatggttcgcccgacatgaatcgtcaggctccaaactaagcccccggctagtaggctgactgcaagacaaacaccaactaagatcactgcatgcgattgttgtgtcagcaatagttgctgttttgttaaaccgagcaactgtaattggcgcatttgctgggcattatcctcttttgcgactaacagcgtcgccaatacattcgctaatacaatcagtaacggcgcgcccaaatataaaccaattgtcaaaatgaaattcaccaaacgttcattgttggcactcgtggtatttgtataggccggtatattccacataattgccgacatccccgtaattaaaaccgcaatgaccgtcactggcgtatacaacggcaaatatttttcagcagtatagtcaatatcatgggctgccatgttcaaaaagagcgttctagcacctaaccaatagagcacgtggctaattaattttaataccgtgtgtccggtaagcgcaattagaattaataataagaacaacacgagattcaggttgccaaccgaattgccgagactgccaattgctttctcggaatgaccgacataggttaacgccatgctttgcatcgttagtttaataattaacccactgacgaccattaacgaaacaatcgtcctaactctacgaacgatccgccgtcggtgactgagatgcttattcccatcttttagttgatggcgtgcatgctaaaaaccaccactaccggtaattagactaaccaagacaaccgttaacaaaagtgccaagaacgaaaaatgaattggcatattcggcaacatttggggcccaacaatctgctgcaaccacgcataacaaaaacgcgttagtggcaaggcaacgactccgccgagcagagcactcaccccactgacaattccgatttaaatccccaaaatagcggccagtgcattgatcgttgcccctagaatcgcaagcattagatagtccgttttaaactgatccaaaagctggtgcacgacttctttaatcacgattaccattgtaataccaccaaaaaataccggcatgataaaaatcggcaacggtgtattcggaccgtatagatcaacttgctgcgactgtgccacattcacaattcccgttaaacaaaaaccgaggattaaacccactgttacaaaaactggtattgttgctagccattgccgccaggaatgctttaactgtaaccaactgattgtccacatcgcttacaccacctgatccaaggcggcatagattgtcgcaagtgtcggttcagtcacaatttgctgaacctgaccgtcttttaatacaatcgcacgatctgtctgactagccagctcaatatcgtgggtcaccataatcaccgttctccctttagcaaccatctctttgaaatatgtaaaaataatcgctttggatgccgaatctagcgcacccgttggctcatcggcaaatagcacatcacaatcagttagaatcgtgcgagcaatcgcgactttttgttgctcaccacccgataaagtcgcaacaggcccatcgatttgtcccgcaaagttcattttggtcagtaactgtttaatctcagcacgttgcggttgctgatgactcaagcgctgttgtaagacaacattttcaaagacgggtaaagactgaatcaagttgtattgttgaaaaataaagccaatcgtctgtctgggaagagccgctagttgattgggtttcaattgatacggattaatccccgcaattgccacagtgccgcctgtaggtcgcgtaatccctgaaatacaatacaacaacgtactcttaccagacccagaaggcccaacaatactgaccaactcccctttttgcaccgtaaacgaaatatttttcaataaggttgtcgtctggtcagactgcccaattgacaccacttgtgttagttgggcaaccgaaagtattgtgtttgtcatcctaaaaacctccccaaataaatcctgttcccgattcctcttcaatgtaccactttcatctggggaagaaacgcgactaaagacgcaaaaaaacgctcgactaaagtaatagtcgggcgtttttttgcattattgcatggcttggtaatcgtcatagagagtttgcatctctaaatcgtttggcacgagcttcaaatattgtttgagggccgctaacatttctgggacctgtgccatttcttggaagaataaaattaaatcgtgtagaaagtccgagttatctttcaagtcaggataagctaacagataattttcgcgcgcttggtcaacatcatccaccgccatctgtgattgcgccaatgaccaatataaatcagccgttggtttatgattttcaatcgcatcttgtaagaaagcaatgttttcggcatggcggccttgacggcgataaacttggctcaaggcactaatttcgcccatattatcaggatcaatcttgagggcctcgtttagcatctgttcagcaacctcgttattgcctaattgaagcgctagatcgctccccttttgatagaggacctcgttgtaggcatcgtacccaattccggtctgaacggtcgttaaggcgtcttctaattgattctgagcctcttgagctgctgccaagtaagtatatagtgacgtatattgtggatcagtcgtctgtaacttggttaagatttcaattgctttttgataatccttaatttgtaagtacaaaaagcccatctggaattgatcgtcttctgttagaaattctggcgtcaacccttcgtaaatctgcaaagcttcttcaaaagccccactgctggcataactagttgccaaccgcttttgaatattcacctgtcccagttcaacaacgtcttggtcgattagcgtctcatagtaattggcggccttcacatattcacccatttcaaagtacaattcagctaatgcgaattgcatgacgggttcatctggatataagcgcaacgccgtcaataatttttgttcactaacttctggtaagcccattgtttgatagacatcagctgccgtcagcagactttcggcgtacgcattggattctggcgtaatatctgccaacaagttcaaggcgtcgtcgtattggccatcgctgaccgcaatatctgctagtgttgttctgatttgatcttcttcaggaaattgggccaacaattgttggtaaattgtcgttgcttgttccaaaaaacccatcgcatataactcttcagctaagctgtagagcgtatcgggttcatcagcaactaaggcttgttggaagtaagtctgtgcttgttctaaattattatcttctaatgctgtaagcatttgttctgaattcgtcatttaaccaccctttttcgattgttccattttaacatattcggattaattgccaataaaaaaagactgggaaaaatcccagcctataaattgaattcttatttaacagaatcctttaatgctttacctggcttgaatgcaggtactttgcttgcaggaatcttaatttctgcaccagtttgtgggttacggcccttacgagctgcacgttcacgtacttcaaaagtaccaaagccgattagttgaactttgtcaccttttttcaaagtgtcttggattgaaccaaatactgcatcaactgcagcagttgcatccttcttagttaaaccagtctttgatgctacgccttcgatcaattgtgctttgtttgccatgtttttcacctcctgctcatcacagataatcagtaattaattaccgaaatcatttttgagtggtcaaaaatgacgaaacaatgatttgatcaccatttcattttttaatttatcacacaaacctagtgatagcaaggaatttcgctaaaaaacagcattctgagcaaattagttaatcatattagcggatttttgaaaaaacagcttattttcgttgacgagggatcaaatggattggtgtaccagtaaagtcaaaggttttccgtaattgattcttcaagaaacgttgatatgagaaatgaagcaagttaacatcgtttacgaagaccacaaatgtaggcggttgaaccgctacttgtgtcatgtaataaatgcgcaatcgtttcccattaatagctggagttggtgtcaccgttgttgcgtccatcaagacttcgtttaagagtgctgattggatgcgccggttttggttttcactcacttgttcaatcatcgctggcaagttttgcaagcgaacgccggtcttagccgatacaaagatgattggcgcatagtctaagtattggaattgatcgcgcacgtgattttcgaactctttcatcgtgtggttgtcttttttaagtgtatcccacttattaaccacgatgataatcccacgaccagcttcatgtgcgtagccagccactttcttatcttgttcacgaataccttcttcagcattcaaaacgactaatacgacgtctgaacggtcaatcgcacgtaatgcacgcattacggcgtatttttcagtattttcgtagaccttaccccgtttacggatcccggcagtatcaatcatggtaaattcttgattatcttcagccgtgaacttcgtatcgatggcatcccgcgtagtcccttcaatttgagagacaattacccggtcttcttttaacatcgcgttcacaagtgatgacttcccaacattgggacggccaatcaaactaaacttgatgctatcgtcttcttcttcgtcatcttcagctgggaacttagcaacggcggcatctaaaagatcacctaacccttgaccatgagcccctgaaacggcgatgggttcgccaaagccaagactatagaaatcaaaaatatcttggcgttgttctggattatccgccttattaaccccaagtaagatcggtttgtcagcgcggtataaaatttgtgcaactcgctcatccgcatcagtaaccccttctcgtgcactcactaagaagataatcacgtctgcttcatcaattgcaatttctgcttgttgtttaatctgttccataaatggtgcgtcactaatttcaatcccaccggtatcgattaggctaaattcatgccctaaccattcacttgtggtataaatgcgatcacgcgtaacccctggcgtatcttcaacaatcgagatccgctcaccggcaatgcgattaaaaatcgtcgatttaccgacattaggtcgaccaacaatggcgataactggttttgtcattgtattcattcccttcgttgttcagtgtaccctgtctgagccaaactgacaaggtcactccgacaaagtccgctgaacttccgcttcctctgcgtcgtactaatcaatcaccgacataaacgtagggtctgggacaaaacctagttttgtcccagaccctacctttttgcatatgacttttaaaaaaattatttatcgtctaatgttttaccaagcatgtcgccgatactgaaacctgtttcttcttctggcatcacatagtcagaaggcgccacatcttcgtgttctgaatccttagcaccagcaggtttttcttgcaatgctttgattgataaacctaaacgttgttgttcaggatcaactgataagaccttgacttgaaccgtttggccttcttctaacacatcgtttggtgtggcgatatgttgatgtgagatttgtgaaatatgcactaaaccttcaaccccagggaagacttcaacaaaggcgccaaatgttgttaaacgtttaacgaccccttctaaagtgctaccaactggtgctttatcagcgatatcatcccaaggaccaggttgcgtatctttaattgataatgagatccggcctttttcttggtctaagctcaagactttcacttgcactttttgaccaacttctaagacatcagaaggttggttaatgtgatcatatgaaatttcagaaacgtggactaagccgtcaacgccacctaaatcgatgaatgcgccaaagtttgtcaaacgagcaacttcaccttcaacaacatccccaggtaacattttttcaaaaactgcttgtaacttaacttgacgttcttgttccaataatgctttacgtgaaagaattaaacggttttcacttggttcaatttcaataatttgtaaggttaattcttggcctttaaagctgcttaaatcacgtacgaaacgatcagaaatcattgaagctggtacgaagccacggacaccagcatcgacgactaagccgcctttaaccacgtcgatgactttagctgtgattgtttcttgattagcaaatttttgttcaatttcagaccaaactttacgggcttctaagcgacgtttagataataagtagctcccgttttctttatcgttaccgattcttgaaatgaccactaaatctaattggtcgcctactttggcaacgtctgcgatgtcttcaataggttgacttgataattctttttgaggcacaaccccttcaacaccagttccttcgatgccgacaatcacttgtcgatcttcaattgctaaaacttcacctttaacaacgtccccaattttgacttcgtggacactgtctaaagcagctgccattgcatcgctgctttgggtgttattcaaattagcttcactcatagctaaaatcctccttaacgactatctatacagttactattttagttgatatctatttggattaccagttattttacctcgttcaaagataaaattacatatttttctttacaattgctaatattgtgtcgaccacctcatcgattgttaactgagttgtatcgatttcaatggcgtcgtcagctttttttaagggtgaaatggcccgtgtactatctttttgatcacgtaattcaatctctgcttgtagcgttgctaaaggcgtcataatccccttagctgtattttcagcataacggcgtttagctcgttcttgggcacttgccaccataaaaattttaaccttcgcagcaggtaacaccgttgttccaatatcgcgtccatccatgacgacttgaccttgatctgcaatctgacgttgccgtgcaaccatctcagtgcgcacaccagctaaagctgatacttgtgagacattattcgtaatttcaggggttcgaatggctaatgtaatatcttcaccattcaagaagactttttgccctgcttggtcaggtttaaattggatatctgcttcttttaaagctgctaaaattcccgcttcatccccgaagtctaaccctaatttctgtgctaacacggttgatgcgcgatacatagcacccgtatcaacgtatacgaaccctaatttagtagccacaattttggcgaccgtacttttaccagatgatgctggtccatcaattgcaatttgcatgttctgcctcctgaaaaaatcattaaaaaaggctgggagtttccccaggccttttggtagtactgattatttaacttttagagctgtgcctggtgccacttgtgaattggctgttaacccagggtttaatgcaagtagttgatcgagtgttaaaccgttattaaccgctgcgcggtataaaccttcgccggctttcaacgtataagaaccacccgttgtttcgcttgaactgctactttcagttgttgtttcttcgctactactattttgagcgtctgcttgagcttggctttgactattagccttttcagcttcttctgcagcttgtttgctactttcaactgcttggctttcactagccgctttttcactttcagcctgtttagctttactttcgctggccgctttggtagcactttcgctagcagacttcgcttttttagcttctttcttagaagcactatcactatcagaagtattaacgacaatcttactagactcgactgggcggttagcccggctagaatgaatcgtataggcaataatcggaaatgcaatcatcaaaacaagcaatacacctagaataatggcaaaatatgtatttcctttttccttactctttgaagcaacacgcgataaattcccgcgatcatcacgatcatcatcaaactggctttcccagggtttgtcttccgtctgattatctaattttttcttatcatctttgagcattgacggccctccctattggtattctttgatattgtaccatagacccttttaaaatacccagaaaatctctaaaacaattgcttcaaaataccgtcccaatggtctaacccgtctattttaggggatttatcatcagttaacgtttttaaattaaatttttctaaaaagaccgttgaatcctgttgaccacaacattgatcagcatgggcaacctgttggggttgctcgtcaaaatagttcacaataaattgccgccgacagccttgtaagtttaaataatcaaccattgtttgaagcgcaaaacgcttttctttttgccgattctgtaacagttcactaacggcctgttcatccatcccaatttgctgataccgccgtaataattcaaactcgttgccttggctttgtttaaataatgtcggttcttgatagaaacgccgaatcaatccagcttcaggaatcccaaatgacactaacgactgttgcagatacgtatcttgcggtgttgctaacaacattgcataggctggttggccatcgcgccctgcacgaccgacttcttgtagataactttcgatattttgcggtaaatgatagtgaatcacatagcgaatattggctttattaatccccattccaaatgcattcgttgcgcagattacgtccaactgcccttgcataaactgttgttgaataatgaagcgctcctgtggcgaaagcgctgcgtgataataggcaactcgcatcgctgtcttttgttgcaaaaaagccgcaatctcgacagtcttttgacgacttgaaaaataaataatcccgggcccctgactctcagttaccaattgttgcaaaaaggcgttcttactcgcttcatccgcttgttgactcacccctaagtaaatattaggacgatcaaccgacgtaataatcctattggccgactgcaaatctagcttggctaaaatatcatgccgaacctgtgcatcagctgttgcagttagtgcgagcgttgcccccggatttaattggtgcttgatttgcgcaagcactaaataatccggccgaaaatcaatcccccattgtgaaatacagtgggcttcatcgatgaccaataaatcaatctggcattgttgtagtgcttgaatgaccgccggctggcttatcgtttcaggcgccataaacacgaaacgatactgtggcaattgtcgcaataacgcatgcttttgccgcggttccaaatttgaattaatcgcgactgcctttttttcaccttggtaattcaactgtgcgacctgatcttgcatcaatgcaattaaaggtgaaataatgacagtggtatggcccaaaagataggctggtaattgataacataatgattttcccgtcccggtcggcaaaaccgccaaagtcgcttggcccgtcaaaacagattgaatcacttctaattgtcctggcttaaatgtctcatagccaaaccgctcttttagcgttttataaatcagttcatccgtgctcattgggcgttcacctgcctttgaatttgataaagccgatactcaaagaaatctagaccggggagtgcggtttgtgcttcattatagctgagcgatggctgttcagtcatcaatctagctagtttttgtgtagttgcatcctttaagaattgttcaaacggaaaccgtgggagtaacatcgcggtttctaaaaggtgttctttaatcgttccgatcttaacccggcgctggcggctgatttgtttaacactcgccccttgttggatcaattgccaggtctgtaacgtactctgactcaattgcgtttcagcctgatccactaattcattcaatagcggataagtcgtttggtgcgccaataaaagccctaaaatttgagcaaaggcgtcgatggtccgcacacgaactgtcaaggatgggctatctaaggcttgcgccagttgttggtggcttttgcccaagacttgatgtccgatcagttgatttgccacaagatcggcttgttgcggatctaactggtcaagtaattgcgccaattctagctggaattgactgctaaaattgatggttgccttatgccgcttaaaccaactgaccaccaacacgcggtccttcatactcgtttccaatggatagtactgcgtattttgatgatgatattccgacacaatttgaacggccaacataaaacgagcagtgaattggggtaagtgacccatctgtgggccttcatagtgcgtcggccaaactaattgcggctgccattcagcttgtttttgttgcccggtagcagtcaaccaaacataccgctcatcgatttcaatccaaccattttgctgaagtcgttttaattctgcttgaaattgtgcctgttctagattaggataaatttggagccattttaataatccatatgctaaaccggcatacagatttgaagtagttcgtttaccaattaaggtatagtagattgcttgataccgccttttctcaggcgccaacaagcataatagatacgccattaacatcatcaattaagtcctttattgagaaagtgtgaatttaatgctctatagtcaagtcatcccggaacgctgtatcgcctgcggtctctgccagctaaaggcgcccgacttattcgattacgatcaagaagggatcgccttttttaaacccgatcataatcagggaacgacgccaattgaagatcctaaagaacgaattgcgtttaaaaccgcctacaccgcctgtccaactggtgcgattgtacgccaatcaacgccatttttatcgtagcatatttacgtcctataaaaaaggttgtgcccgcttggacacaaccttttttgctgccatttatttggcaattggtttttgcatatgttgttttagccatggtaaaatccgtaaatataaaacggcaaacaccaccgttacgagtgcacctttaattaaattaaacggtactaatccaaatagaatgtatttggtagtcgacattcctaagttcaaacccatcaatttaatatagagcggtaaaatgaaaagccagttagcaaatgacatgaagatcgtcatgctgacagcccccgcaacaccagcaattgcttgacctactaaaacgttcgattgacgcttgaataaataatagaatggtaacaagtagcagattgacgccaagacaccggcaaagtcgccgaccaaactcggtaagctagcaccggtcataatgaaatgaagcgtcgagcgaatcaatgcgacccccattcctccaattggtccgtaaacgaacgtccctaacaggacaatcacgtcactaaaatcaatttttaaaaacggaaatgcgagaataattggaaattcgaaaaacatgacgacaaatgaaattgcccctagcattgcgaccccaatcatcgtacgaacttttgaaacttgcattactaacaccctccagatgaggttgccttcgtcagcggacttagccaagtctgattgcatcaaaaaggtctgttaatcagggagattaacagaccttacttgcatacattcatacccaaataagccctatcttcttccatctagactttcactatcggtactggaatcacaccagttcagccaccacaagaatcaacattgtagcaggtcgcggacttttaccgccggtcgggaattacaccctgcccctgaagacgaaccattaatattttgttcgaaataagcatagcaaatcaacgtgccaaaagcaactaattaatcatgccgtgataattttggtcgattcttatgctgtggtttttcatttagttcagcaatttttttgaattctgcgacttcgattggtttcaaagcacggtattcgccagaaactaacccatctaacgttaggaaaccatatgtttcccgtttcaactttgttacgggtaggccaaccgcagctagcatgttcttaacctgatgattcatcccttcgtgaatggtgatgcttacaatggcagtgttcttgcgccgatcagttgaaattactttgaccttggctggtgctgttttgcgtttttctaagacaattcctttacgcaattggcgcaacatatctgcagttggtaatcctgaaaccttcgcaatataagtcttgtcgactttatattttggatgcatcatcatgttggcaaaatcaccatcattcgttagtagtaataagccagatgtatcgtaatctaatcggccgattggataaacccgttcaacgatatcgccaaggtattcagtgacgacccggcgtttcttatcatctgtcactgctgaaatcacttggcgtggtttatacaagacataatagaccttgcgttcacgcgttaacggcacaccgtcaacttcaatatgatcgcttgtgctatccaccttgatacccatttccttcaccacttcaccatttaaggtgacgtgaccagttgcaattaaggtttctgctttccgtcttgaagctaccccagcatttgcaatcactttttgtaatcgttccatttattgttctcctttggacgtctcttccgacgtcgtatctgtttcatttaacgtttgttcaaattgacggtaatacaagtctgctgtaccaccttcactaccatcgacatcagcgtcaagtgccaattgttcaagtggtggtaattcatcgagcgattcaagaccaaagtaatctaagaaataggtgctcgttccatataaaattggccgaccaggcgcatccttacgccctttttcgctaattaattggcgggctaacaaggtttggatggccccactactttgaacacctcggacctcatcgacttcaatccgcgtgattggttggcgatagacaataattgccaatacctcaagagcggcctgactaatactagttgacaccggtccatcaaaataggtcttcaacaacgtcgcgtattcttttttggtgactaatttatagatatcttcggcttgaatcaggttcaaacccgattcagtgttgccgcggtaacgatttgccaatttttctaataactggcggactgccggttcatcgagatgaataagttgcgcaatttgcgcaagcgcaattccttcgtcccccgcgacatataataaactctcaatttcagcgagatgattcaactgaaatgccctccttcaaccgaaccatgattggtgcatcatagtcggcttgttcgcaaataatttttcgatccttcatcaattctagtacggctaaaaatgttgtgacgatttcatctcgatctgttttaacaacgaccaacgcttcaaaagcaactggttgagcggctaaatgacgcacaatccaactcattttatccgtaatcgaaatttcgtcattttggaccgttttgaagaccggttgtttagcttgggcttcgaccaacattttagaaactgcggccgctaaatcgcgtggcttaatcacgccgcgcgccagtgggaccactttttcagctggattactactagctggcttagcaaagagctgttggcgctccaattcgcgctcttgcaaaaccgttgcgaccttttggaaggcttggtacgccaatagttggtccactaattcctgccgtggatcgacgtattcttctgtttcttcttcaattaattcaggtgccttaggtaagagcaacttactcttaatcttcatcaacgtcgccgccattactaaataatcacctgcaacatctagtttcaatacttgcatttggtgcaagtaatcaagatattgcgcggtgatttcagcaatgggaatatcataaatatcaatcttagtttgcttaattaaatgtaataataaatcgagtggtccttcaaaatcagtcaagaccaacgttaattgttcagtcattggtcaatctagtccatttctgtattctgatgttgttcccatttagcaatcaatggcgcagtctctaacgaacccatcacgcgactttcaggataaagcgccgctaattcatccaacatggtgaaatagttcccgtcgctacgttccgaagggttcagtgaaatatggcgcactaaaatatagtccgcacccagttcaatccccacaacaccggcaaaatcgccggcttcattgcgccataaatataaattgcgttgctcatccgacgtatagagcgccaattcagcttgtacatgactgacttcttttaaatccggtacgaaggataaaaagcccatcgcaatcttttcataatcatttttatacttgaataacatgttgacctccattgatcaaacaaagttctaatagcattaactctaccatagtttataaagcgcgacaaatctaatttaatcgcgtggatgactccattggtaaacttctgtcaaatgtttcttactaatatgcgtgtaaatttgagtcgttgaaatatctgaatgccccaataattcttgtacaattcgcagatctgcgccattttcaagtagcacagtggcaaacgaatgccgcaatgtatgtggggtcacgtctttttcaatcccagccgttttaacatgtgccttcaggttcttccaaatcccttggcgcgtcaacccgttaccatggaaattaacaaacaggtacgggttagcacgccccttcgttaattgattccggctacgatcgaggtattgattaatccaatcaaccgctacatcaccaatcggtataatccgttccttattccctttgccgagggtctgaattaagcccagtgataaatgcaaatcagccatctttagatgaatcagctcgctaactcgtaaccccgtcgcatataaaacctctagaatcgctcgatctcgtaatccaagtgcggtgctcgtatctggtgccgccaatagtcgctcaatctccgccgtcgataaaacagccggtagatgacggccttgtttgggcgaatcgatttggagcatcggattttgtttaatctgcttttcacgcgctaaatactgatagaatttacgtaacgttgaaatgctccgtgtaatactactttgtgccttatgcgcatcagtttgttcttgcaagtagttcaaaattaaaaagcggtcttcagtaaaattggcaacctgctgacgttgtaaaaacgccgcaaactgttgtaaatcctgccgataactctggcgcgtattctccgaaagaccgcgttcaacttttaaataatgtaaataatcttgaattaaatcatccatgtgcttcctcttttacaactgcgtcacgtcaatttggcgactaggatccagttgattggctggtaacccattttgttggttaatctgttggcaacgtgcacagatcccgtgaaatgttaaacgatgatctaacaccgtaaatgtgtaatcatcatatacctgttgttccacggcaggcaataaatccgtatgaatttcttcgattgccccacattgcagacacaacaggtgatggtggaaatgatggtcgtgatcagtctcacacaagtcatagtgggtcatcccatcttcaatgaaccgaactttattcaacacatgcagttccgtcaacatctcaagggtgcgatacacagtggccaacccaatttcagggaccacctctttagttgccataaaaatctgttcggcactcagatgcgcttgggcatggtccaaaatgaccgccaccgtcgcagagcgttgtgctgttaacttgtagccggccgcttgtagctgctcggatattcggtctaattgctcagctttatccatttagcaacttccttttcaatcattcaaaaaagcttagtcttgcttctcgtcatctgtaattggggcaatatcagcttgacctttttcagttaaactcgttaggccctctgcttgagtaattaagccatttttcattaaccggcctaatgcccgcttaaaactgcctttactaatcccaaagtaactcttaatcgcttctggatcgctccggtcagtgtatggcattgcgtaatcaggttgccgttttaagacagccataatcatttcagcatcgtcgccaatttcttcatatgcccgtggtttcaaactgacatttaaactaccttcaggtcgcacaccaatgacgcgccccttaacctgttgacccaaacgtggttctgcttcacgttcagaaggatgaatgaacccaatgtaaaagtcatccgttaaaataaacgtcccggctaacttcaaacggtagaccgtccccatcacgtcttggttcttcatttctggtttagcaccttttgaaattgatctgaagatgctttcgtcagctagttggccccacatccgccctttttgatcgacttcaatcgcaatcattaaacgatcacctggtttaggccataatttcgtaatggttggtaaaatatccagtgatacgacaatatccttatctggcaagccaatattgacgaaaacgcctaaatcacgccgcgtttcaaccacttcaccaaaggcataatggcccacgcgtgatttaggaataaacgttgataagatcaattcccgacttgagttttcataagcaaaaccagtcaccgtttcaccgattgtcaattcttgttctaaagtttctttttttaattcaaatgtcacgccgtctttttggacaaagaaggctgtttcattttcatctgttactaaggcagtaatgacttgcccgattaattcattcatagttaacctcttttattcttattaattaatgaattggtactaaattaaagaccgttaaaatggtataagtaatccccgctgcaattacggggccagccgcaatcccttttagaaaaacgacacccatgatggtcccaaaaaccaaggccactgtcatctcaggactagcggacaatagccccacacccttcgctgatagtacagcaactaacacgccacaaccaactgcaataaaacccgccggcgttttaaaggcattgattaagtctttgacaccaatttgccccgttgcaatcgggactaggatagcaaccgaaatcactgtcactccccaattaatgcctttggcttggatcacaggcagcaccttatttgaaatcgggaatacctttaatattaaaacaaccgcggtcgcaatgattaaagattgatttttcgctaacaatgcaacgattaaaatcgctactaaaaataaccaactttccatgtaaacctccaataaagtctccctactattgtaccgataaatgaacgacttgtcagtattttcagaaaagtaattcaagattcgcatttttaaaacaaaaaaagccccctcttttcagagggggcttcatttcatcattcaggaatgattaaagagcgtttgttgcaccgcggtaaacaatcccacgacgtgaatcaacagtcacaacttcgccatctttgatagcttctgttgcgtctttagcaccaacaacaactggaatacccatagcgataccaacaacagcagcgtgtgatgttaaaccaccgttttcaacaacgatagcacttgatttttcgattgctggtaagtaatctttgtcagttgatttaacaactaagataccaccatcaattgctttttcagcagcttctttagcgtttgaagcgacaacagccttgccaacgattgtttcatcgccaacaccttggccttgtgttaattttgaaccaattaattggatcttcataacgtttgttgtgccacgttcgccaacaggaacaccagcagtgatcaagattaggtcgccttctttagcaaaaccatgttcttgagctgtttgtgtagctaagttgaacatatcatctgtattagcaggtttcttagcgataactgggtatacaccatagttaactgttaaaccacgacgtgtacgttcgtcgaatgtaacggctaagatgtcagcttgtggacggtatttagaaatcatacgtgctgttgagcctgattctgtagcagcaacgattgtcttgattcctaagttacgtgcagtgtgagcaacagcttggccaattgattctgtcaagttagtcttgctgtatgctttcaatgcgtatgcatcgcggtctgttaatgatttttctgttctttcatcaatgcgagccattgttgcaacagcttctactgggtagtcaccgttagcactttcacctgaaagcattgttgcgtcagtaccatcaataacagcgttagcaacgtcgttaacttcagcacgtgtaggacgtgggttttcttgcattgagtccaacatttgtgtagctgtgataactggtttgccaatagcgttacatttcttgatcaagttcttttgtacaaaaggaacattttcaaatggaatttcaacacccatgtcaccacgagcaatcattaaaccatctgaaactttcatgatatcgtcaatgttgtcgataccttcttgtgattcaatcttagggaagatttgaacatgttccatgtgtttttcttctaataattcacggatatctaaaatatcttgaggtttacgaacaaaacttgcagcgataaagttgatttcatgatctaaaccaaaacgaatgtcgctagcatctttttctgtgataccaggtaagttgattgaaacaccaggtgcgttaacacctttacgtgagccgaccataccgtcgttttgaacttcagtaacaagttctttgtttgcttcgtctttttcaataattttaagatccactaaaccatcatcgattaaaacgtgtccgccgacatgtgtgtcgtcgtatagacctgggtaagtaacagcgattttttcaggtgttccttcaagtgtatcgtccattgaaatacgtaccacttcaccagtgtgtaattcaaatttcttaccttgttgaacagttgtccggatttcagcaccctttgtatctaacatgataccaactgttttaccagttaatttttcagcttcgtgaaccatgttcatccggcttaaatgttcttcatgatcaccatgagagaagttaaagcggaatacattagcacctgcttcgattaattttgtgatagtttcaacattgttacttgcgggtccaagtgtacttacgattttggttttcttcataagtggaatctctccttttatgtctattttttaaaagacttttcagtcgttttaacaattttatatatggaacgatgaatctagtaagctaaatcttcgtttaaatcataaagatctaacattgcgtgatgcttgtgattgaacaagtctaacatatcatgtgcgataatttcgttcttttcaatcccaagtgcaacgccacctttgccttcaagcaataattcaactgcttttgagcccaaacgacttgctaacacacggtcactagctgttggtgccccaccacgaacaacgtgtcctaaaacagttgaacgtaagtggaaatcgccgtattcagaaagtttttctgagaattcatcagcgtgcatcacaccttcagccaatacaatgacagcgtgtttttgaccatgttcacgtgaagtacgtagcttatcagcaacggccttaacgtcgaaatcatgttcagggataataatgtcttgtgcgccaccggcaacaccagcccaaagcgcgatatcaccagcgccacgacccattacttccacaacgaaagttctttcgtgactagcagctgtatcacggatccggtcaattgattcgagcactgtgttcacagctgtatcgaaaccaattgtttgatctgtaaatggaatatcattatcaattgttcctggaagaccaattgcgttataaccatgttcagttaaacgaagtgcaccgtgataagaaccatcaccaccgatgacaactaaagcttcgataccaaacttcttgagttgttcaatacctttcaattgtccttcgacttgtgcaaattctggataacgtgctgagtacaagaatgtcccaccacgttgaatcttgtcaccaaccgtaattgggtccatcttgaagatatctccggcaactaaaccagcgtaaccataattgataccatagacttcaaggccttcatgcattgcttttcttgcaacggcacggatggcagcgttcataccaggtgcatccccaccacttgtcaaaatacctatgcgtttcatcttttcaccccaggcaaatattttacttaaaaaaccaattggtctttcaaagtcactaatatattatcacttttcagaaaataagtcttgtcttttgcgaagattttcgcaaagatagaccaatttctttattggtcaaacccttttaaaatcacatttcccgtccctaaaaggtttgtaagcgcggtcgttagtttttcgttgctcacaacccaatagcgctcgttcaatagaattgactgtttatcggccgcattgtacaagataactggcgttgttccgtgattttgttgtaacaattgatacatttgttgttgcgcttgactcgtcaacgccgtttgaacccgtaaataaagggtcgctttgggtagcgtcttttgtgcatcttgtgccaattgaatctgattagcaaccacttgtaaatcgcgacgttgttcaactttcccggtgataaaaacaacttgtcctgtttgtagccattcactgacccgttgataaacgccagtaaagagcgtcacactaatttcaccggttgcatcttgccccgttacaaacgccatttgatcgccttttttcgttcgaatcaccttaattcggcgaatgaatagcaccaaatggaccgtttgctcgggtgccaaatcactgatatcaggcacatggtagtgttggcgtacacaatcatatttttcgaccggatgtcccgaaacataggccccaagatattcggcttctttatccaatcgttcagtcaaggttaaattcggtacggcacgttctttcggtgctaaaacagcaaataaatcgacgttattccctgacaacttcacactatcaagcaggtcggctaagttggtcaacagcgcattccgattcggattaaactgatcgaaggcgccactataaatcaaggcttctaatgcctcttgcttgagaaacttaggatccatacgctgtaagaaggccagtaacgatttaaacggtccgttcgttgtccgttcttgaataatcgccgccacaaaatcgcgccgaacttttttaatgctgaacaaaccaaagataatccctgagtcggctaatctgaaataactttgactgcggttaatatcaggtggcagcactttaatttgacgtttcttagcttctgctaagtaagttttcgtttttgtcggattgttcaaaacggcatttaataaagctgcaaaaaaggctgctggctgatgaacttttaaataagccaaccagaaagcaattttactataagcaacagcatgtgaccggttaaatccataattggcaaaccgctcaatatagtcgtagactgtcgtagcagcagtttctgtgtgcccgcgttcgagtgcgccttgaataaattgcgtccggctagcatcaatcaccgccttcttctttttactcattgctcgccgcaataagtcggcttcgcctaagctaaagccccccatcttggacgcagcctgcataacttgttcttgatacactaagatcccatacgttggctctaaaatatcggctaacgacgcgtccggataagtgacaggttcttgcccgttcttacgagcgataaatacgtcgatgttttccatcggacctggtcgatacaacgcatttgtcgccacgacgtcttcaaaagaactcggtgccaaccgccgtaaaacattcttaatgccaagtgattcaaattggaaaataccattagtatcaccttgttggaataatgcaagtgttttaggatcatccaacggaattgagtgtgggtcaaacggctgtcccgtttgctgtccaacaagctttacaatattagcaagaatccctaaattacgtaatcctaaaaagtcaatcttcagtaggcccagttcttccacgttgcccattggcaattgtgtaagttcaatctcttcaccgccactttgtaatgcaaccgtatcagttaacggtgcttggcttaacacaatcccagccgcatgcgttgagtagtgtcgtggcagtccttcaagtttctgtgctgtctcgaatagtaatcgattttgagtggaatcggccaccaaatttttcaatggttgtgattgttgataagcttcttttaacgtgattttcagcatgtccggaattaccttagcccaatcattcatttcaaactgacttaagccaaacacacgccccacatcacgtaacgccattttagctgccagtgtgccaaatgtaataatttgcgccatatgattccgaccgtatttgtgatagacataggccagcacttcatcccgacgattatctgggatatccaaatcaatatctggcatattcgcccgattggggttcaaaaaacgttcaaacaacaattgatattgaatcggatcgacatcagtaatcattaaagcataggccaccaacgaccctgccgcagagcctcgccctgggcccgtcataatatgttgttcatgggcatgccgcatgacatcggcaacgattaagaaataatcggcaaagcccatctcgttgatcactcgcaattcatactgcaagcgttcttgatattcttgcggaatcgcttgatcggcaaaccgaacttgtaagccttgctgacttaactgttctagatatgccgttgccgactcttgatgcggtgtttcaaagcgtggtaattgggcccgcttaaaggtcaactcaacttgacagagttgggcaatcttatccgtattgtacacggcatcgaccaactgcaatgcttcaaactcggccgtaatctgatcagcagcttgtaaataatagccgcctggcgttgtctgatcaccactatggagattaacttgcgtaccagctttaatatgttgtaagacttgcactgaaaaagcatcatctggttctagataacgaacatcacctaatgcaaccagcggaactccggtcgtctgactcaatgcaattaacccgctaagttggggggctgctgctcgcttggcactgattcctaagtacaagctccccggatcaactgccgcctggagttgcgtcaaatatgccgttgtttgctcctccgcttgcaaaagtaggcggactaattcgccatcttgagccggcgtgatcactactaaatggctgaaccactgtgtaatatcagcaaatgaaaccagatcagtttgagtcatcactttagaagaaagcttcaaaagattctgatagccaactaaatctttcgccaatacaattagcggaaaccgttcatcggtttgaagtaatccgccaatttcaagcgttaaacccaagattggatgtaagtcagctgccttggccgccttataaaaatcgactagcccataaatcacgttcttatccgtcagcgcaatactctgatagccgcgcgccttagcactttcaatcagtgcatcaattttagtggtactttccaagagcgtataggtactcttaacctgtagttgaacgaatggcaagcaacgccccttctttcttcgttaattcgattactcttagtataacaaattatttcaaatgattctctttggaaaacgtgttacaatatcatagaattgaatcaaagaaagaaggccaactatgaaatacgttatgaatctactttggacattgatttttgggtttgtcattggatttatcggttctaaactaacgaaaaccggctttaacattcaaacaactgttatcgtctcagttatttttgggcttttgctcaacttcttacctcttgtcttaccaaaagatccagctaaataaagcacaaaaaagggccgcaactttatgttgcggccctttttacgtttattttgtaatgtaaatatacaaatcacttgttgaaaaaccggtattgaacttcacaccatttgattcaatcgtcttcatcgtggtttgactaccttttttgtttttcttcgtataatcgctaaattcggacatcacttttttggaatcagcgcccgttgcttgcgcaatcaatgcaaaactggtcccaaaatctttcaatgccgctttatctttgagcgctttaacgggtgtaatgagcgtcatccccattacatcttgactatcaacagaaccgcgaatggtgacatgctttgttgcgacccattcagtcaccccatttttaggtgtggttggtagcaattgatccttttgtgtctgttgcacctgttgcattgctgcttgtacttcctgttgccgctgcttaagtgtcatcagatcagcaggtgcaagttggcctgctttggcagctgctgcttgtttttgcaattcctgcgctttggtttgatctgccttagataacgccatcccaattaaagcctggttgtattgcgcggcaatcttggcatattggccaactgatgtgcccgctgcaatcgttaccttcttttgaacggttttaccgtttgctttagcttgtaccgttactgtttgtttgttagtcgttgttggtacttgaatcacataagttccgtctttgaccgttgctttttggaaatgattatgattaatccggtattgtaaatcagcttttttggttgttgaaccttttacgactgccaccattccattttggcgataatttgttttagtcgttgttaatttggttgtcccacaaccagccaatagaccgattagccctaagctggtcactaaaccaacaattgtttttttcatattcgtcaccttttcattgaaatttaactcattgaaatcttagattaacccttttagaatcacaattcaagcgaaaacgacgaagtgtcacattttttaagaccaatcaaaaagagcgaccacttaacggccgctcttttaaaaacttattttaaatttgttttcttttcataacggttaaacatatataatgcaacaattgtgaagaagatagggccagcaactgaccagattgtttgacttaaattaccatcaattgctggctgaataatcgtaaagacgttcgcaaaaccaactgtgaacatgaccatgcagacacagaatttatagaaggtcttccctttataaattgtaaatggtttttcgatactttcatcctttttaaagccaaagtatgagtatgccacaaacatgtatggcaatgtcattgaaacgtttgtcatcgctgttaagatatcgaagaacttagcagcactcttaccaccaaaagcaacgaaggcaataatcacaattacaattgcagcttggaccttcattgcattgaccggcatattattactatttttcttagtaaatgacttaggccaaaaggcagcaggtgtcccttcgataattgtttttaatggtgagaaaataattgtaaagaaagccccactaagtgctaagaacattgaaagccccatgtaacgactgagccaaatcccaacttgaatagcagcatgttcacttaagtgcattgctaaccctaattggtaacccatgttgttcatggcaatataagcaacgttccccaaagtaacggttgcgtttgaaccggttgctttggcgaagccaccaccattggtaaagacgaagttccagttagtgaaagtccccatcataaagatcccaacagcatagccgacaacaatcacgacagcagaaatagctaacccttttggaaagttaaccttagcgttttcagtttcatctactaatccaccaacaacttcaagaccaccataagcgaagatcgcaaatacaacgaaactgaagacttgaatcatcgatgtatagctttgatttggtgattggaagaatgcatgggttgtaacaggttgtgccattacccctttatttaaaacaaggattaacaaaccacccaagaataaaatcacgttgattaacgtaatggctgaaccaccaatactggtgattctcttgattttatcaaggccttttgatgtgacaaaggtaatgacaatgatccaaataatagctaaaattcctaatgtttgcacaccatttgtcaaaccaaagattgaccattcttgtgttttatcaaccccgaaaaaggcgtttgataatggaatccaaatcccgttcccgacgttaaccatccagataatgtatgaagcaaaccacataaatgtgccgacaaaggcaaatttagcgttaacggatttctccatccaagagtaaatccccccctttgcttcaccaaaggccgctcccatttctccgagcataaatgcataaggaataaagaaggtaacagctgctaaaacataccaaaaaattgatgcatatcccatcaagtagaacgcacgtgggatattcgtaaatccaaagactgacgtaaagaccattagaataagcgcaccaagcgttaacttattcgtcttcttcttttctgccacctaaaacacctctttcatttttttcagacttaaccacaatgattaatcctctgaataaaaattagttaactaacatttgttaataaactaattagttacctttattttacggcgaaaatagaaagaggtaaacgaattcattatttttgtaattgaattatttgtgaatcttaattcaattctcattttctagtcaattacttattttttgctggcgttttttcttcaactggttctttcttcaaagtaatcccaattgcaatcttatataccacactctgacatgctaatttcagcaatgtttgttgggtttcagtgaccaatgtacctgctggatttttgccttggtcataggggctgtaatcctcatctaactgatgaatcgctgctaaaaacgttaagataaagtaatcataaagttgcttttcatttcggttaggtgtttccgctgtcatcaattgtttgatttcttcaatcgaaaaactcgttttcaatagtgcaataattaaaacttgagcaatttgcgattttgtataccgttttttaatcggtgctgccacaatttcttttttgacgtaattattaatcattgaagcggtgatttcatctaaatttaacgcgtttaggtattgattgatgtaactaaccacttgatccatatatagttccaaatcgggcaggtctgtccaacgtggtaagcgtacaatttgtaaacgatcgagcttttgtttcaagtgttcatttttcataattatcaatctccttttattcaatactcattataccaccatctagtatttaaaactaggaaactgcataaaaaaagagtttcttattcagaaactctcgatgacgattagtcgttagcttttggtgtaacaacttgttcgcctttatagaaaccttttggtgatacacggtgacttacacggtattcgccattagttgcatcgaattgtacgtttggtgtgttcaatttgatatgtccacgacgcatacgtttcttcgtctttgatgttcttcttgctggaactgccattattttcagactcctttatatcttagattcattaatgatataccgaactcggggaatttggcaaggattatctcaatcccattcaaattgattttaaatcatcacgtgtcccgctacttttgtccgcgacttctataatactatgtttatccgctaagagcaagtcaattacagaaaaacaattgattaacgactcttaatgacaccactttcaaagtggaatcgtccttaatcgtcactaacattctgtacatcatccctaataagtgtaccatacaaacatcaatctgacagtaataatccctgattgatgtccaaaaaaagcgccgcaaattaaatttgcagcgctttttcaatcgttagcgattttcaaaaactaactggttatcttttaagttaatttcaaccgtggttcctggtaacatatgcccggcaataatttctttagccaatggggtttcgatatggttcgtaataaaacgccgtaatggccgcgccccaaatgcaggatcgtaaccttcttctgccacccattgtttagcagcatctgaaatcgtcaatgtcaattcttgatctgacaaacggtctgatagatcatgaagcattttgaccacaatcgcttgaatatcgttcaagctcaatggtgtaaacataattgtatcatcaattcgattcaagaattctggcttgaatttcgtctgaattaaggcttgaacactttccttagccgtttgtgaaacttgaccttcttcatctacaccgtccagtaggatttcagaacccaagttagaagtcataatgatgattgtattcttaaagtcaaccgtccgtccttgtgaatctgtcaaacgaccgtcatccaacacttgtaataaaatgttaaagacatctggatgggctttttcaatttcatccaataacacaattgtgtatggattccgccgaactgcttcagttaattggccaccttcttcatagccaacatagcccggtgcggcaccgaccaatcgtgatacagaatatttttccatatattcactcatatcaatgcggaccatatgccgttcagaatcaaataaatcctcagctaaagcttttgctaattcggtcttcccaacccctgttggtcctaagaagaggaatgagccaagcggacggtctggattttgtaagccagcccgtgaacgtaatacagcatctgtcacagcattgacagcttgatcttgaccaattatccgttcatgcagaacatcggcaagacgcagtaatttttgtcgatcaccggcaactaatttggcgactggaatcccagtttgggaactaaccaccgttgcaatttcattttcagtaacggattcctgaaccatccagtcctctggcttttcagccttttcaaggtcggcaaggtcttcttctaattgtggaattgtgccgtgttgcaacttagcagccgtttctaaatcataatttccctgtgcttcttctaattgccgtttagcagcatcaatttccgcttttttatcattaatgcggttcaaatcttctttttcagtttcccaccgcatctttaaattattcgttgtttcgcgtaaatcagctaattgtttttgcgtctcagccaatcgtttttgcgaagcggcgtcggtttctttctttaacgcttcttcttcaatttcaagttgcattaattgccgcgttgcttgatccaattccgttggttgtgaattcatttcgacgttaatgttggcactggcttcatctactaagtcgattgccttatccggtaagaatcgatccgtaatgtagcgatttgacaacgtcgcagctgcgactaaggcattatcgtgaatccggacaccgtggaaaatttcaaaccgttccttcaaaccacgtaaaatactgatggtatcttcaacggatggttcttgaactagcactttttggaaacgccgttcaagcgccttatctttttcgatattttgccggtattcatccaacgttgtcgcaccaatcatgtgtaattcaccacgcgctaacattggtttcaagaggttcccagcatccatgctaccttcagtcttaccagcaccaacaatcgtgtgaatttcatcaatgaagaccagaatccgaccttcactcttcttaacttcctttaacacagctttaagtcgttcttcaaattcaccccggtatttggccccggcgattaaagtccccatatccagtgaaataattgtcttatcttttaaattatcgggcacatctttacggacgattcgttgcgctaatccttcaacaatcgccgttttcccgacaccaggttccccaattaaaacggggttattcttggttttccgtgacaaaatccgaataacatctcgaatttcttcgtcccggccaataactggatccattttgccagaacggaccgctttgattaaatccgttccgtatttttcaagcgcttggtaattatcttcttggtttttagatgtcacacgctcgcctcctcgtaaatcagtaatgactttctttaatttttgttcagtgacattttgtttctgtaaatattgaacaagtgcctggtatttcaaacccattaagcccaagatgaccgtctcagttgataaaaattcatcttggaattctgttttgtatttttcagcagcagttaatacttggtacaagttttgtgagatgttttgaccgtaattcgtttgaccttcaaccgttggaattgcgtcaatttcacgatcaatctccgcctcaagagcatcgatatctgcaccggcttcttggtaaatttgccgtcctagttgttgtggttggactaaatatttaaagaggtgtggaatatcaatttcagtttgatgacgcgtcatcgcgattttctgcgcttctgcaagtgcatcttggacagcttgtgtcatttgttctggattcatagacgtcattcctttttcagttattttttaaattaagtgtcagattattctgactaattctataatagtcaaaataggtcaaactttcaagtaattcgcttataaatcagacttaagacggagagctggtaggcgagttcttcctgaaaagtaacacaaaaaagaggctaagacaaaatctgtctctgaagtgaacccccgatattggaccaaaatccaatatcgggggtttttatattgaccaaatattctaaaacattaaaaataaaagttgttcaggattatctaacgtcacccttaggttataaattaatagcgagaaaatatggtattaagagtaactcactagttgtctcgtgggttcaacgttataaggcctttggcccaaaaagactgcggctcttacaatgtcttaccgttcttgttttcgcattccttgacgctggaatcaactccggatttgccttcactggactcttcactagcaatacgcaatggatgatgatcttcgcgattatcccaatcctcttgtacaacggacaaaaaggacgtagcatgaagtatttcttctacttgttctacccaattcacatttggttattattcattcttgcttcattaatgggcgttggcgaataaattattgattctctatgtaagctaaaaactgtaaaaaactcgtttaagtatgtcataatatctttggtaggaagttattaaatttatcataacttttcatctcgtccagaactgacgacgcgaaaagctgataaggagaagggggttttacatcatggttaaatcatatcaaagtttttggtcccggatttttgatttctcaggcacttcaaaccgacctgatttctggtggccaatcatcattaactacattctaggtggtattatcatcggtattattcaaacaataaccggccatccaatttcagaaatctataatattggggatttaggcatctcaatgggtcgtaacatcgtcgtcttcattgtttggattgcaactttatccgttaaaatgcgccgacttcacgatacagaccgctcaggctggtgggtactcattgaattcataccgcttatcgggacaatttggttctatatcctaatgctcttaccaacaaaaacaaaccgttgggcataagcaattaatgtaacagtcacacgtgtggctgttatttttttgcaaacaaaaaaggcgattaacaccgttacggtagtgttaatcgccttttgttaagcgcctaattctgcttaacaccttgttatctaatggagccggcgggggttgaacccgcgtccatgcgcattgccacgtcaatctctacactcatagtcgaacgatttaggagttcgctagtccaaaacgccgtccgacagaagctcggatgaactagctagtttgcaaatctcttttaaacacctcaaacggcagcgtttaacgtaacccaattaatttgagacccggatctaacccttgggtgaagtcaggcggatcacgctatgctggtgtttaggcagctacagcgtaagaattgttattgtttgcagttataattaactgtaacgttgttaacgtagacgtaacctacgaagtgcaactcacgctcacctacacatgtcgaatccgtaacggccccgatatgcaaatactagtttagcatatcagccagtaatatgaaagactttaaccctatttcaccactaagcgtttcttaggaaaccggtcttttaaaaaggtttgtaatttttctaccgtcgttttaaagcgcaacttggcaatccgaatttcaccgacataaaaacaagcttcgactaagtcaccttgtgttagtaattcaatcttagaaatcgctgcaaattgatgaatagtatttaagtttgcaatcaaacttgttttggttaaaccacgaggccaaaaagcaatcacaattaaaattacaacagagccgatacctgtgatttgatcgctgagcgttctgcccatcactaacgttaaacctagtaagaggattccagcacaacataaaaaaatcgtccatagtcgattccgttttgcgcgccaaaccattttcgtttcaacaatcagccagataatgagcaaggcaattgccaataagccataaaataatgtaaaacctgtcatattcccattccctccactaaaaaatgaccagccatgcgctggtcattttcactgatgccttagacgtggccaatttcaacaacgtctctggcaatcattacttcttcattagttggtactaataatactttaacgcgagaatcgtcagcgctgatgacgcgttcttgagccatcacgttattgcgttctggatcaactttaacgccaaagaaactcaagcgatcggcgatgcgttggcgcattaagatgtcaccttcacccattccggctgtaatcactaggacatcaagaccacccataatggcaacgtatgaaccaacatacttgattaaacgattgacgaagatatcaattgccaattgtgattctggacgttcttcacgcgttttttcaagatcgcgcatatcaggagataatccagaaatcccataaatacctgatttagtattcaaaatatcgatcatttctgctggatctttaatgtttaatttttccattaaaaatgcaacgagtgatgcgtcaatgtcccctgaacgcgtactcattgtcacccctgcaagtggtgtaaagcccatggatgtatccaacgatttaccgtctttaatagcagtcactgaaacaccactaccaagatgcatggtaatcatctttaattcttccaatggtttgcctaacatttcagcagcacggtgggaaacataccgatgactagtcccgtgggcaccgtattttcgtgctccatacttgtgataatattccaacggcaaactgtaaagataattttcttcaggcatcgttgtatggaaagatgtatcaaaaacagcaacctgtggtacatcatgtaaaatcttgcggaaagcacggataacacctgcttcagcaggattgtgtaatggtgcgtattctgacaattcttcaatccgttttaatgacgcttcatcaattaatgcggatgacttaaagtcttccccaccggcaacgacccgatgaccaatcccactaatttcactatattcattgatgattttaaattcgattaacttcttcaataacaaatcaaccgcaacatcttgcgtcttaatatcctgggtcattgagaatttttgaccatccccgtatttaacggtaaagactgaatcggataatcctaaacgatcaaccatcccttgtgcgacaacttgttcttcaggcatgataaataacttccatttaagggtagaactaccagcgttaattgctaatacttttgacatctaatcaccttttctattcgattattgtaaattatctttatgccaagtccggatcttctgtagatacgttgcaaacgccttttgatcgttagaatttggaaattcacctaataaaatttggtccacttgtttagccccggcaccttgtttttgaaggactaaaattgctttttgaccttccttagtcttaaacaagtttgctggtaaactcaataagccttgcaaatagacatgttttgtcacccatttaatcagttgcttagcttcatccgtttccaaaatcacatttggtactaggaaaaagccatagccgccttctttcacataatgcatcgtttgttcaatcaacaagtgatgtgcatatgaatgaccactggcagcgtgggtttcaaaatcagccgcccgttcatctaatggataaaaaccaattggtagatccgcaacggcgatatcaactggtttaaccagtagcggttcaatcgcatcctgatggaaaaaggttgttgaatgcttctgcaattcactactgatgcccgcaatttccaacaaactatcatcattatcaaccccaaaaccttgcacggtattccccgttagtttttggatatgattgattacggttgccaataagttccccgttccaacaactgggtccaaaattgtcttgatttggtcagcaccaccaaaaacctctgccaaataagctacaagatagccgatcgcatctggtgtcatttgcttgtttggttccactttaacttgacgcaaacccttgagcgttgccaactgtaatgcttggcgaatttcttctgcttcaaattggttgagattaaccgccgcataaagcggttctagttgtgcaacagtggcagcatctggtaagccgtcttcaacctttacgcggccaccatctgcaatattagcaatggtctcggtgagtgcatccaaataggttgtttctaaattcttttcaattaattgtgttgtttgatcgagttgatcaaacaacgtttctacagcactcttaggcaaaatagccacctctattcattagattcctgttatattctatcggtattctaacggcaaagcaagtaatacaggtgggtatacctagaattataaatcatagtaagcgctttatcaaatagaaaatttatccttgatctgtttcattctgatctggaaactgttttcgataaccattgtttaactcaatgatgattaacttgtgttgctggtcgatacgactcttaccgatgttagtctttataccttgaattgactgagtttgccgcgctttatttgttaatttaagcaagatttgcgtttggtaatagttagtcaaactgacgtaactctgttgttgctgttggtaactgtgggtcacaatcaacaacgcacttgtcaccaagctcaacatcaaaactgcattcaagagcgcgactgcagagcgtttaatctgtatttttcgtgtcatgttgcgcctccaaaaaacattcatgttgataggctgtcccatcgcttaagcgcgcttcgagttctaaaaaaggttcatgatacaccatttttaaccgcgagaccccatcaaacagaggcatataaccattcttcgtactcgaaaccaccagttccttcttagttttcgttaaggtatagcgtcgtttcgaatctttagcgacggttaattgctgttcataattcgcctgttcaattgaaataaattgagcgtcatccagaaaacgatcaagttcaatcatactaatgtgccaattaatattctgacgttccatctgggttaattgcgttgtgtgcgttagtgttttagtggttgccaatattaattgactgctcaatatcagaataacgagagctacaaccatttcaatcagtgtaaatccagagcgtttagtaacaataccattgaagtgcaactcgctcacccgctttatttgtgacataaatggcctgttttttggtgacgacttggtatgtttcccgttgcaactgccattgtgcttgtggcggctgctcatttgccaatcgattggcagccattgccattacagcatattctgtagcagcacaccgccgttgaacttgatgtgctttaaactgccgtagactcattgtcaaggtcaagcctcccatcaggagaagacttaacgccacgatttgttctattaatagaaatgccggtctacttcttaacatgtaacatcccccacatcatctggacccgatattcataacggtgcccatcaattttagaccgacaaatcaatgaccgcggtctagcagctgagtcatgattaaattgaatcctaaaccatgtttctggatcgacgcacatcaatgtttctggaatcgggatatccatactttggtattgtggatccgcacttgtgtaatgcaacgtgtggttggtttgatcccaagataagtgcacattatgcggctcaacagcgacatattcgcgagtcgcatgccaagacgcttcaaattgttcaaaaaataaacgctccgcctgccgtgcacgataatctcgaatatgttgcaacgcaaataaactgactactccaacaatgaacaaaacaagacagctctcgattaaagtgaacgccttattttgtattttgaacaactttattatccttaattgttatgccgcgtttttcagcttgtttaacctgattattggttaaatatttttcacctgatgctaaatcggctagactcgacaccgttttaccgtcatcctcagctaattcaacttgtgtttgaatcgttgccactagagccgtatccgttttttgctcagctgtctctttctgatgcattaaattaggtgcaattaacaagactaacattgctatcacagctagcacaacgaccatttcgatcaatgtaaatgcatttcttttcttcttcatgaaattccctccattgtatgatatagcggtaataaaatactgagataggtacaaataatgatgatcccaattaggataaacaagagcggttgtagccaattcaccttctgtttcaattgccgttgcagttcatcgtatttaatgactgcaagcagatcaacctccttggccatctgttgtaacggacttcccttagcgagcactaattgcagctcaggtggataaaaaacgccatccgctaagttcgctaatagcgtgccccccttttggacagccgtttcaagttgttgcattaattgtacaagccacgatgttttcgccaaacgatgtgtaagctgatgcatttcggccaagtttaagccgttattcaggcaagtcgctaaatcaaataataagcaatactgatagtaagcctgcaacgttttaccgatgaacggccatctaaatgccgccgccaatcgttgtaatagcggtcgccgatgccaacggaataaatacacactaatcagaccaccagccataataacgaatgtccccatcactctaaaaaatagttgtaatggtgatgtcgccgaagttgttgggttaaactgcgcgatttccggaaaaagataaatctgcatcatcccaatcaacgccccgagaaaaaggagtagaaaacagggataggcaattacgccaactaactctctacgccgtttctgttgaattcgctgtaattggccaagatgtaacaaacactcgcctaagtttccctgcaactcagtcaattcaatctgtgcaacaaggtgtgttggaaacgaaaccgccgctaagcttggtgctagtcgttttcctgcttctaacccagtttgcacctgatgcagccactgcttttgtgtcggaaaaacaatcggcatgaactcaagcgcttgttgtaaagaaaaaccattttgcagtaagcgccctaacagcaacataaattcagtattgaattgaacagtggttttagtcttcatgaacagcctcctccaattgttgtgcagttgctaactcatagtgggccgctacattgtggccttcgaccactagtgattgataggcaacacccgctaaacaagcggttaattgtgagtggctaattccaagatctaatagacggtccatcacccccgttgtacttcgcgcgtgaatcgtacttagtaccaagtgaccgctcaacgccgcagaaaccgcgtgttgggccgtctgtaagtcgcgaatctcaccaataattaaggtatcaggccgtaatcgcaaactgattttcaacaatgctgcataggttaaccctgcggcttcattcacctgtaactgtaagaaagctggctgttgaatctctatcggatcttcaatcgcaaccaccatcttatcttgcatgacttgttccgcaagatagtacaaacttgttgtcttccctgaaccagttggaccggcaaatagcaataatcctggttgctgaattaactgcattaaacgacttaaaatctgcgagtcgtcgcaatgataagtctgcccaatgggataaatgaaacgaacaactaaactttcccgattcaaaaaatcccccacggttgccaaccgtaaataaatcaattcgcctgccacctcgatcgctgaacggccggtctgtggacgccgagtttcactgatatccatccccccttgatacttcatttgattgagccattgattgccttctgacagagtaactttttgtaacggctttagtcctgtcgctaagcgttcaataattgcccaacccgtcgatagtggtcgaaaataaagatcctgcgctttttccgttgcgcacttttgcaaaagggttgttaatacttcggtcatctcgtccctccttcctgactaaccaaagatacgcaaataaccggataattttctgcacaaaaaaagtgcgttgcaattacttgcaacgcacttatcaaacaaattagtcttcttctggtaattcgccagctgtataaacttcttgaacatcatcgttgtcttccaaagcatcaattaaacgttggaattgttctgctttttcaggatcaaccggtgttgtattttgtggaatcattgttaattcagcatttgccaatgtgtatttcttttcaagaatatcacggacatttgctaattccttaggatctgtgtaaatttcaaacacgtcttcttcagtttgtaaatcatccgcgccagcttctagaatgtcttcaaacatttgatcttcatcaacatctaagccttcacgtgcaatcgcaatgtaaccacgacgatcaaacatgtaagcaactgagccagaagcacccattgtcccgccattacgagtaaatgcaacacgaacgtctgaacttgtccggttcttattgtcagttaaagcgtgtactaaaacggcaacaccacctggtgcatagccttcataagtaatttcatcgtagttcgcgccatcgctaccgtcagctttatcaattgcccgtttgatattatctttaggcatgttagctgaacgtgctttatccataattaaacgtaatgcggcgttagaacttgggtcaggaccgccacttctcgcagccatgaaaagctcacgggatagtttttggaaaatcttgccgcgttttgcatcttgtgcgtttttacgaccctgaatattatgccattttgaatgtcctgacatatctaactcctcttttcgattatagaattctggtactaagtcgttttctatgatagcaaattaccatgctaaaagcaatgatagtcgggctatcgtctctttttttgtgtaaaaatccactgtagtgcgcaaacaatcacaatccccgttaatgcgccaacactgtccaacatcacatcttgaaaaagtggcgtccgatcaccagtcaacatttggtgaaattcgtccgtggccgcatacccggttgctgccagccaactaaagataactgctaaaaaaccaccggttacgcgtggccgtagccctaaataactaaaagccgccaataagaaatacgtcccaaaatgggcgccttttcgcacgaaaaactccacaaatttgaaatacccagatgcttttacactctgttcactgcctgcataatggaacgaaaattgacttaaccaagccttaagtggttcattcttgagaaatcgttccaaagtgggcaccgatgtttgttcatgatacgtcattgaagaactgtaaaataagatcgccatcatcaccagtgcagccactaagaaccaatcacttttacgtttaaacattgctgacctccgaaaaactagtatttctctattataccaaagcacacggttgtgacgagcactattattcgttatactactctgaagaaagagggaaattctatgtctgatcaagatcgcttttaccaaccacaaaacgctaaagatgcaatgcgttttgttcaaaaacttttcaatcaatataaccaagcgccactcacagaagaactaattgcctatcatcaaaaattattggcttatctcactaacgatgttacaaccgaagtccaaaaacaagcaaattctgaacaagccgaaaaactgactggaatgattgaagccatgcaagattggttgaagattcgcctcagtggccaaccatatgccgggaaaatgcaacacttcaagttcgttcctgatagccaacaagcccacttcaaaacccgcacgattaaaggtggcaaaaaagcaaataacctcagaacatctgcccgtcactaattcgccttgctattttagctaaaagtgctaaaatatttttgtaagcgtttgggcccgtagctcagttgggagagcgcctgcttcgcatgtaggaggtcgccagttcgaatctggtcgggtccatcaatattaaataaaaccaccctattatttatcagggtggttttttcgttcaattatttaattaatcgtatttaaaacgtctgtcagcgcttcacgggttaaaggattaggaaaactgtcctgcttcatttctaataataaccatgtacctaactgtagaaattgttcttcaggcattgcgtattgtaattttaataatcgttgggcggcccctctagtatcgttggcagcaattaaacttgccaattccctttgaaaaggcaattttttagcattttcttgtggaaagacaacctccgactgtgaattaccactttgtttcgataacaaataacccattccttccgcaaaagaatcaacttgtcgcatcaaccagtcttttttattgtccattttcatcccccccaattatgattattttaacaaattattatttgaagaacagtatttaaggtcacgaataattctctaattcgctagcctcaacattattcattttcaaagtgcacaacttaatcgttgccaacttctgcatctagcgctatattattggtaacccattcacaattcgaaggagatttttaatcatgacagataaagtctttacaaaagaaacactcgctcaatataacggtcaagatggtcaacccgcatacgttgccgttgatggcgtcgtttatgacctttccgcaatcgccccttggcaaggcggcaaacattttaaaggtttaacagccggacgtgatttaagcgaatttttcgccaagtcacatcacacaccagccactttaaaacaagccgttcaagtcggcacttaccaagcttaataacaaaaaaatctgccatcaacaaaattgttgatggcagattttttaataattcaatatttctagaaacatcctagctgctgaaacgccctagaataatagtgtaattaataaaatcgcgaggactacctgtacggtcactaatccgccggcatatgctaataaacgtttaccttggctgaagagtgcctttaagttcaagcgtaacccaatggctgctaacgccgttgtttcacaccatgtactcaagaaatggcacagtgtaccaaattggcttggaaaaacccgtaagctatttaagacgcagaataataggaagccaatcacgtaccatggcactaagctactcttcttcgctaataattgttcgctcagttttgtatcactgactttactttgtttcttttgatgtaagtaaccaaaaccgctgacaacaaaaaccaaacagatgatccgtaaaattttgaataaggtcgctgtgacaaccgttccttggttaatcatcgtcgcactggcaaccacttgaccaactgactgcactgttccaccaattaacacgccacggagttcattattatgtccccacatcaacgttccaataactggcaagagtaacatcaagatggtccccattagatttaccaatgtaatcgcaatgccggtatcttcgttatcggcatcgatgacgggcgcaattgccccaatcgcactcgagccacaaacggcattcccaccggccatcaataaataggtaccttcgctaaattgcaaccggcggccaaaccagatggcaaacccaatcgtacaactcatttgtaacacggtaaacagcacaccatgccagccgatttgttgaatactttggaatgtaattgtcgcacccagtaacatgactgaatattccaataattttttctcggaaaacttagttccggctgctaataccggttgttgcaaccaagtattgccaagtacgatgccgacaaaaagcgcaatcgttgcgccgcctaacattggtaaccataatttagcgatgtaataactggcaatcgcaatcgctaacgataacgcaaagccaggtattttttttgttatattgtccattgctttactccttctcacttgttatcttaaactataccgaaactctttcaattaataaaataaatctttataatagttgttattaagataacgaatagaagtgatgatatgtttaaaattttaacaacttttaaaaccgtttatgaaaccaagaattttacaacggctgcgcaactgctttttctatcgcagccgaccgtttctgtgcaaattaaacaattggaagatgcgctgggggtcacactatttgaacgcaatgggcgccagcagatgacgccgactaagagtgctgatctcttctaccaacaagcacaacaacttcttgatttatgggaccaagatttgcacgcactccatcatcaagatggccagccaaaaacaccgtgccgaattggcgcctcgcacaccactgcaacctacttattgccaaccctgcttaaagcgcatcggccagcccttgaaacactcgccttagatatcagtacactcaactcatcgcagattgttcaagaattgacgcagcacaaactagactttggtttcattgaaaaaccattaaccgaaaaagacttgattcggacgccactacagaccgatcaactggtcctagcaggtcgcccgaatgaaccttggttacttcgtgaacagggttctggcgtctatcactacacgatgaattacgtaaaagaaaataatttaccactcgaaaacgtgatgaccatcaaaagcaatgcgatgattatccaactattaagacagggtatcggccaatcattagtttctagcgcagccttacttgattacccagaaattccctatcgaccattgtcccaacaatatcaacgccaattctaccttgtcgcccggaagaatttaccagcaccaatccaatcatttattgcgttattaatggcgaccccactaccaatcgaataggagtgttattttggaaaactcaccacatatcaaaaaagaattaacgggctacatcatccgtgacgttttcagctcgttaggcttatccatctatattttagcggacacatattttatcgcttacgcagtcggaccaattggcttggccgctttgaatattgatctgcccatttttaacttatttaacggtttaggtctgatgctcgggattgggggcgccacgattttctcaattaacaagagcaagcatcccgaaaagagtcgctcgattttcactcaagttctttcttttgggattttattaggcctcatcatcatggcgctcggcttaatttttattcacccactactccacttactgggtgccaatcatgaaacgctcgccccaagcttgacctatttacgaattattttaattggcagtcccttatttatcatcaataacttagtcttaagtttcgtacgtaacgatagtaatccacatttgacaatgattgcgacactttcacaaagcttattcgtcattatcttcgattacctcttaatgttccccctacacatgggcatgatgggtgctgcgatggccacgatttgttcgccaatcgtcagcctactcattttgacacaacaccggcatcacccacaacggttactaactttgcagcacttaaccttacgttttaaaccgacgttcaaagcaattcaactcggtttcccatctttcttaactgaaatgagtactggggtcagcattttcgtctttaacattgttattctccatctcagtaataactatgccatcgccgcttacggcattatcgccaacatcttactagttggtctatccctattcaacggtgttgcagtcggggttcagccaatcgttagtcgcgaatttgggaaacatcattgggataatgtcaaaacgagtctcaaaatcggtttgctttccgcactcgggattgcggtaggattatatctcgttttgattggtcttaaattaccgatcatcgaaatttttaaccatgaacacaaccaacaactgattcgctacgcgtctgctggcattcccttgattttcattagttttttcttctcaagcatgaacatcgtcaataacttattcatgaccgccattgcgcaacctcgattgtcatttttcgtggccatcatgcggggctacatcgttttgattgcgagcgtcttggttctttctagccttttcggattaaccggtgtttgggtgagtgtcccattaacagaaattttaatcttcatcatgggaatgctcatcacgcggaatctcttgaaaacaatcgatcaatagtattaaaaaggtgtgtcacagctcaacttgctgcgacacacctttttttatttaaacatcaattgttgaatcagtgaaatgacggttggattatccggcaattcagtatgggctgcatggtgctggctcaccgaaattgtcatataatcagcaacttgcttttgaaaaatgagccgaccagccgcaacactcgctgctgggacaatcccatcattcttatcgttaattgtgccgccgactgaatagaccactaagtctttggataaatgttgccggcggctctttaaatcagctaacatcggtgtttcctgagtgatgtgctccgacatgccattatatggcgttcccaacgtcagtaatcgtgtaatcttcggtccacttccactacgctcagcataccgcgttaatacaagcccaccgttggaataaccaaccccaccaaaatgcgtaaagtggtattgtttagctaatttacctgctgccaatttaaaccattcggattgtttaaagacgttctcatcaccatctgcattgttttcaaacgcaaccacaatcacggggtgttgtgttttttgatcaaagcgaccactggttttcaagtgaccattttttaataccgttacttttaaaacatggcgtgtggcttgacggttcaatttagcaaaggtgccattaaacccttcaactgttccattactccccggtacgaaaataacgggctggtttgcggtggccgaagttggctgaataatcgatggcaccgttgttggaccagtcgctacatgaccgataaccccaccaatgccgaaacacaagatacaaattagtaaccattgccattttttcatttgtcatcttcctttgaatcaatcaattggtaatcgttctgtaggtagaatcgcttggatatcggctgcaatcggtgctgtaatcgagattgattgttgactgaatggatcttgaaattgcagtcgatacgcgtgcaatgcttgtcgcgttatccctaaatcaagcggcccatcatagagctgatcacccaccaatggatagcctaacgcgctgaagtgaacccgaatctgatgcgtccgcccagtatgaatctgaactttaaccgccgtcaactgacccgatgcacccaagcgccaataactcgtccaagctgactgaccatccgccaacacctcacgtcgcggttgatggtcgatttgtccaatcggttcacgaatatcccctgatgctggtaaacccgttcctgaaacaactgctaaatagaatttttgtaattgatgctgttcaatctgcggttgcaatagactttgtgcaatttggtgtttgccgactaaaacaattccacttgtatcaaaatccaagcgcgtaatgatatgcggtactaaatctgttgcaccctgcgcttgccagtaacccttaatgcgattcaacaaagtatccgtttgattagtgggacccggaatcgttgccaagccagctggtttattgaccgccaaccaatactcgttctcataacaaatagtgattggttcgtgactaacagcaactgattcatcggccggttcagctggtaactgcaatgtgaccacatcgccgcattgtacctgatcactaggcgcacttttttgcccgtttactagaatcggttggcctaacgccttaattttggcgtacaatcgttgactgatgccacttgctagcaagaattgtttaacagattgtggttgattgacgtgccatttaatttccattattcatttcccatctttgttctacttactgctattatacgatttatagcttgccaatgccaatcaatggccgaccatattgtttgctaaaagcttcaccaattcgctatgcttaaattagtaagtaaaagtggttgccttttcaggggaacgtgctatactaaagttacttactaataataagtaaaacaattggaggtttcactatgacaaaaaatatcgcagttttaattggtagtttacggaaagattcatttagcaaatcagttgctaaatcattgatgccattattcccatcagattataatctagaaattgttgaaattggtgacttaccattgtacaaccaagattatgatgatttagatcaagtaccagaagcttacacaactttcagaaataaaatgaagacaatggacgccgttttattcgtcacaccagaatacaaccgttcagtaccagccgtattgaaaaatgctttagacgttggttcacgtccttatggtgcaagcatctgggataacaaaccagctgaaatcgtcagcgtttcacctggtgcaatcagtggtttcggtgctaaccaccacttacgtcaatcacttgttttcttgaacatgccaacggttcaacaaccagaagcttatatcggcaatgtcatgaacttattagatgacaatcaagaaatcacaaacccagatacacttggtttcttccaagcaatcgttgatgctttcgatacattaatcaaacgctattaatcgaattacataaaaaacgccccgactttcgtcgcggcgttttttattttgtattagtttaccaattcgttgcattccagattcgcccatcaagttcaccttggcgttgttcaatccgtaatgctagttcatcactcgtttgttgaagcgccgtataaaaagcttgctcttcatacgttgtggcttgttctttttgtagttgaatttgttctgttaaccaatccattagccttccccctcttcttcgcgaatcagttggacttgccaattcaaatcggttaattccgatcgtttgtcggcgaattgttcgcttaaaagcattaaacgttgttgcgcttcaggcgatgtggcttcagcagcctttttagtcagcatcgcttcaaaccacgctaattgctgatcaaaattgaactcggattgcgtcaaataccgttgataatcgatgaccaagcattgtttatcagtttcttgccaataacccaattgatgaatcgcaagtggtggtaaataggtcatccctagcttacgagccaccaattcatatgggcgcaaaatttcagacagcgttgcttgttcactgccgccagcttgaaaatgtttagccgccgtaccagttgaaacgacaaccccgagtgttttcccggctaatggttggcggccattaaaggcaaattgccccgttaaaacggtgtccaaccacatttttaagctcgctggagcagcataccaatagagcggaaattgaaaaataatccgctcatggttgcgtaataatgcttgttcagcagccacatctaacgtctcaagcgcatctaagtggtgccaagtgatggcttccagtggtgctgcactcgcttttaaaaagttttggaccatcgacgtctcaatttcgggatggctgataatcaccaatgttttcatactctgccaactttctatttctaaagtttaattgtacaaaaacatggcgtaaattgcgactaatagagttccaaatattgttcgcgttcccattcggaaacttgttgacgataagctgcccattccaatgatttagaatccatgaagctctggtagagataaggccccattgaatctttgataatctcatccttggctagttccttcaatgcattgtgcaatgtggatggtaggtcagtgatgtgattttccttccgttctgtttcgtccatgctatagatgttgcgatccacaccagcatcaggcaagagcccttgatctaagccagataaaccggctgccaaaatcgacccgattgctaaataaggattggcacttggatcaacactccgtagttcgagacgcgttgataacccgcgtgattgtgggacccgaatcaatggtgaccggttatgaccagaccatgcaacataaaccggtgcctcaaaaccagggactaatcgtttgtaagagttaactgttgggttgttgattgccgtgatggcgcgtgcgtgttgcaataagccagctaagaaatgataagccgtttttgaaagttgttctgtacctttttcatcgtagaaggcattcgtaccatcttgattaaagagtgacatattaatgtgcatcccagagccgttgacaccgtgtaatggttttggcatgaaggttgcatgtaatccatgtttccgagcgattgttttaacgactaatttaaaggtttggatgttatccgctgcatcgactgcatcagcgtatttaaaatcgatttcgtgttgtccgggtgcgacttcgtgatgactggcttcaacttcaaagcccatcttttcaagttccaaaacaatatcacgccgacagttttcgcctaaatcaacgggggcaaaatcaaagtagccgccttggtcgttgagtttcaacgttggtttgccgtattcatctaatttaaagaggaaaaattctggttccggtccaatgttaaagtctttgaaccctttatcttgcatttcgcgcactagtttcttcaaattattccgtggatcgcctaagaatggttctccatctgcggtatagacagaacagattaaccgcgcgacttttccatgttccgcttcccatgggaaaatgagccatgtacttaaatcaggccgcaaatacatatcactttcttcaatccggacaaaaccgtcgattgaagaaccgtcaaacatcattttgttacttaaaactttatctaattgactaattggtacttccacattcttgataatcccgttgatatccgtaaacattaaacgtaagaacttaacgttttcttgatccactaattgcttgattgcttctgctgtcaatactttacgtgccattaatccgtcgccccttaatataatttagatgattgtgaaatggttgactgttgtccaactaagccgccgaccgataataattcattggccaataaccgccgcgctttttcgtctgataattgtttatcacgctgccgatccgccttcttctgataaatctggcgaatctgtgccatcgtggtgccttcagctaggtaatccttgatttccaacaaacgatcaacatcgttcaacgaaaacaaccgttgatggcccgttgtccgttcaggaaaaacaagcgcctgtgcttcataataacgaatttgacgcgcagtttgtcccgtcaatttcattaccgtaccaattggtaaaactgctaagttgcgccttaagtgtttttcagccatccatttcacctcacttgcgttttatcttaccagtcgcctttcaaacggtcaacatttgatgttagattttctaacatcagccaacaaaaaaaggtaaaccaatttggtttaccttttagacattagtcttcatcgatgatttgaatcaaaccacctgcaagcataaacaaatgcgttaccaccggtccaacaaatttaaactggcgcttctttaactctttcgcaagttgcgtactgatcggcgctgatttatcggacacgccagccatttgtgaatcaagcaattgcggctgaccatcaacaaacgcccacaaatacgctgaaaaactgccatattcagtttggatggcttgaattgcccgcgcattttgaatcgttgcccgaatcttacgcgtattacgaatcatatctggttctttttgcaggcgttcaacatccatttcatcaaattgtgcgacttgatcaatcaccatccctaccatttgttgtcgcagaactggtattttacttgcagctactttccagctcaaccccacttggaagaccccaactgttaagagttcaaaccaaatacgatcatcgtgcgttggcgtgccaaaataattgtgataagcctgaaccccatctgtcgccgtttcaaagttgttttttgctgtttcatctaccatcgataaaccgcctgtcctgcgctttctgctggaaccccaactttttccgctaattcgctgtaatgtacctctaaataattaaagcagtcagttgtgtcatgcgtcataaaataaggcagcaaagccatctgatcatcaaattgaacatgttcctgttgtgcataagctttcagaacttttgccaactgaagaaaatcctggttggtaatatagtatggtgctacggattgctttgtatcaaccgtcacgatggcccgataagcgtgcccgataccttgtaacccgccaatggttgatggtccagcagtctgcatgaccgcataatgaattgttcgaatttccgttgtcgcaagttgcttaacaacttttgcgggcatgacttttaaaacatctgtctgctttaaacaaatttggcgcggttctaatacaattaaataaggactccgtgcttgccgccaattcgctggcattgtttggccatcactagtaacagttacatccgtcaaagtggcactgaactgttgtgctaaatccacatagtgttgttcgggttgttgcataatccgtcctaaatcggacagcggttttgtattttcactttctgccaaatgccaatgttgccgcaaccgcccaaagaatgaattcggtttagtgaccgtttcaaccccgagcaaagtattcaaacttacattatacaatttggcaagaacaaccaatgtattcaagtctggtgcacttttatccgtctcccatttagaaatgacttgtcgtgacacattaatctgctctgcgagtgtctgttgagagtagcccgcatccaaacgaaattgttttaattgttgaccaattaacatctaaccacctccaagacttaccgtagcgagaatgacacatttatactagcaacaatccaaagcatctcttaaaaccgaccgctacgattcgttgcacccttatcataccatgcttaacgcacaaaaaaagcggtcaatcaaacgcgaatttgattgaccgcttggcatttatttttcaaagaaggttgtttggactgcccgactaatcgcgagtttaacgtgcgcgtaagttaacccaccttgtaagtaaagtgtatatggggcgcgcaatgggccgtctgctgaaaattcgatgctggcaccttggataaaggtcccggcagccattacgatttgatcttcgtaaccggcaaaatcacttggaatgggggtcacaaatgaatcgattggtgattgcgcttgaacacaaccagcgaacttaaccatatcatccggattaccgaagttcaccgtttgaatcaagtctgttctaggggcatcccatttaggtgagacactcaagcccatttgttccaaaagcgctgcttcaaaaacagcccctttaatcgcattaccagtcacacttggtgctaagaagaaaccttcaaacatcaattgcagattgccttgtgtggcgccttcactggcaccaacacctggcacagtcaggcgataaccaatcatttcgattaatttttcagtcccgacgatgtaaccacccgtttgcgcaatcccaccaccagcatttttgattaaagaaccggccattacgtcggccccgaattctgttggttccgttgtttcagagaattcaccgtaagcattatcgacaaagacaatcaattcagggttaatgtttttgacaaaggcaatcatttccttgattttatcaaccgtgaaactatcgcgatcagcatagccacgtgaacgttggatagcgaccacttttgtcttagctgtaattttggtccgggccgtttcaaaatccacggcaccatcagctaataatggcacaaaatcgaatccaatttggaattcttttagtgaaccaatcccgttaccggccatcccgatgacttcttgcaacgtatcatatggttcgcccgtaagatataaaagatcatcgccaggccgcaacatccccaataaggccgttccaatcgcgtgtgtgccggaaaccaattgcggccgcacaagcgcatcttcagttttgaaaacgtgactatagacggcctctaacttatcgcgtccttgatcatcgttgccgtaaccggttgtcccgtttaaatgcgattcagaaatattttctgcttgaaacgcttcgagcacctttgcttgattattgatgatttgttcatccagtgcttgtaaacgcggtgcgatttgcgtatcaactgctgcgattttagcttgtaattctggtgctaagtttgcttgccaatccattttttaaccactccatttctattattgctgtaaccattgttgtaaatcggtttgaatccgagccaaatcggcttcaggttgttcaaccagattataccaattgaccggaatctggtttctaaaccacgttagttgtcgttttgcgtagtgccgtgaattttgttttacttgagcaattgccacgtctaatgaacagtcactatcaaagtatgggaagaactctttatacccaatcccccgcacggcttgcggactcgtttcacgatgtgcataagccaaccgtgcttcttctaaaagtccagcatcgatcatttgatccacccgccggttgattcgctcgtataataatgcacggtcacaattcaatccaataataaacgtatcataacgtaattcttttggcttttgttgtgaaaacaaagttcccgttgtttcataaacctctaatgcgcgaaccacacgccgtggattcgcactcggaattttagcggctgcttgcggatcaatttgattaagcatctgccacaaagcttcttcagaatgctgatccaaaaaagtttgccatttttgacgaatcgtaaaattctgttccgcatcttgcgcactacccagggtcatatcgtacagtaacgcctgcaaataaagtcccgttccaccaacaaccaagggcatgtgttgccggccgacgatttcagtgacgagttgttgtccttgctgttgaaagtcaaaggcagtgaagcgttgatcgatatccgccacatcaattaagtggtgcggcgcaagcgcctgctcttttggtgtgactttggccgtaccgatgtctaactggcgataaacctgcatcgcatccccggaaataatctcaccttgcaactgttgtgcgagttgtagacttaacgctgttttaccaacgcctgtcggaccaacaatgacgattagcttttctttttccatattttcaccacattaattaacgtattttactagctattcgcgcttaaatacgcgataataaagttgtacttgaatgaattgagacttgaggaggctttacctatgaaacataaatttctaaaaggtttcgtaatcggaaccgtttcaacagtcggcgcgattgccggttcactcttggcatttaagaagaccgtcgttgatccaatcgaagaaaaagaaaatcaaattgaagaaagtcgtcgacgtgctaaccgtaagagccattcagctcaccaaggctaagcgctttgaaaagactgcgtccgttgcctgattggcgacggactttttttgtggaaacgtgctttttaaagctgactcttgggattagcttcgtattgcaaacgaccgactttgtcggtcattaacaacactatgctaatgctcagagtcaaaccgctttaaacgcactctgttttgaaacgtgcgccgccagatatactctttcggttagttacataccgcaaacgatcggctctgccgctcatttacggtatgccactaatcctcagagtatgaccatctgcctgcgcactctataaaaagcccaacagttgactagtttttttcgctagtaactcttgggcttttttggtttaatttaatttctttttacgctttgttttgccggtccaaccagcataaccctttttcaaccatttaatgtcggtgaaaccagcttttcttaacttcagtgctgctcggatactgagcgtaatgcctgcatcatataagtagactggtaagtccatccgtagttcacccatattttgtttcaacattggataaggtaagttgcgggcgcctaaaatgtggcctgcatcaaaatcttttttatcccgtaagtcgacaatttgggccttgcgcattgtttcttcaaacgccgcttccgttaattcgccgcctaagcgtttgcgttgaatttgataatatgcccaatcgcccaagaaccaaagtaaaatggcgatcagaataatattaattactacccatacattaattgtccctaatacaagcatcgataagactcccttataacaaattattgttgatcaaattgaagtgcaagtgaagcagccccgataacaccggctacgtttcctaagtttgctaaacgaatcttagtcgtatttttaacatttgggaatgtaaattcttcaaagtaagcttcaacttgtttacgtaaaaattccccagcagctgaaacaccaccaccgataacgatgtaagcgggattcaacatgttcccaacgttagctaatgctaaaccaaggtagtaagaaacacgatcaacaaccttaacagccaatgcatctgattctttagccatgtcaaaaactaatttagagctgatttcttcaccatcatccaacattgtctttaattttgaattaccagcgtattcttcagccatgtcacgtgcaacgcgcacaacaccggttgctgaagcataagtttctaaacaaccttgtttgccacacgtacattcataaccatgtggttcaactgttacgtggcctaattcacctgcagaaccagcaacaccgtgtaataaatggccatcagcaacgatcccgccgccaactccagtgccaagtgtgacaaaagcaacatcgggttggttttcaccagcacccttccaacgttcacctaaagcagcaacgttggcatcattatcaattgcaagcttcatgtgtgtgccagcttcgatatcgcgacgtaagtattgggttgtcttccagtttaagttgtaagcaccaataacggtcccttctttactgttaacactaccaggtgtgcccataccaatcccgatgaaatcagcaggtgtcatgttatataaatctaaatgatgattaatcgattcaatgatatccggtgtaatgtggctaccttcatctaaaatatccgtatcgatactccagcgttgttggatttcgccatccattgtcataattgcaaatttagcagttgtcccgcctaaatcaacgccgattaacttcttgtctgtcatttaaacttctcctccaataaattgtgattaaacgcttcatttttctccaaccgatgttcacgcactaaaaccatcttagcatcacgatacactttgccatcgattaaccccgcatcataaacgtgccgtaattcgatactggtgagctcgatatcccaaagtcgtttaccaagatggacgtaaacgccaaattgttttaaaagttgttgtacatcatatagagttctcatcaacttcacctttaacattatacataaattgattaatgattcatacccagaaaaccaaataaaatcatcgttgcaacataaattaacccactcaccacacggttcagcgggtcaatcttacccactttaggtgcacccagcgccatactacttaaaaagccgccaagtaccccacctaccattgcgtacaatgcattgtgatcgacaataaattgtaatccgattgttaaaaataaaaacagccaatactggcgtgccacttgtcctagcacggattcttctttaaaggcatcacctaacatcaagaagccaccgaatagccctaagatagctgttccagcagtcacggttggtgtatcgagaccaaaaaaagcgcccgttgtaaacaaactcgccaaactgctcagtatatagatagctaataggcgccagtgtcctaataatcgttcaagttgtccaccaacaaaaaacaaaataaccaaatctacgaagagattcataaaccggccatgattgacagatgccatcataaacccaataatccggccattcattagcatgttaaccgatgtaaagccgttcaaccatacaaccggattcaaaaacatcattgcaaacatcaaaatcgttagtaacatcaaggcatacaccacaatcggtgcgtcttgccaacgttctttaaaattagtcatcttttctcctttagacctgaagaacctgatcgagttggatatcgaattcatcaatggcccaatcagcacttcgttgttgtggtttaagcgctagtgcaacagttggcattggatatttggcaagataacgatcataataaccgccaccaaaaccaacccgccaaccttctggactaaatgctagtcccggcacaatcattaaatcagggattaacacctggctaccagctgtaaccactggttctaaagcaccataggaactcgttgttaattcagtggttgccgttaacgggtaaaaagccatttgtcgctctggcaatgtcttgggcactacaacttctttaccggccaaacgaatggcatcaattaccggctgggtcgccatttcaattggctgactcaacgtgacaccgatgattgttgccttttgaaacacctcggttgccattaacaattccaaaagttgtgcttcttgggcatgtttaagcgcaggcgtctgcgcaagcgtttgtaatgccgcaatttgttgttgccgaatttgctttttagtccgcattcaaaagcctccttaataaaaaaaagcccgagcgcgaagcgccccgacttttgatgtgcgtcactattatttagtttcgcggtgtaaagttactttgcgttcgcgtgggcaatatttctttaattccaagcgatctggattgttacgtttatttttgtttgataagtaactacgttcgtgacattctgtacattccattgtaatgtgaacacgcattgatatagcctccaagctgtaagtaaatttctaaaaaactgtttaattcttagactcttagtatcataccattttttatggtatctgaaaaggttattttggaatatttcattcagtaatgttatttaatttatagaaactcgtaatcatttcacgggctagtaacgtattgtagtgccctttatcagagtttaagttcgggaacacaatggcgattgccacttgcggattatcgtatggagcaaagccaaccaaactagaagtaacggtttcgacttgcttacttgtcgaatcgtttggatcttcacgggcaaatgattgtgccgtcccggttttagcgccaagcgttggtttaatatctttcaaggtgtgtgctgtcccccaagcgttggtcccattgacaacgttgtacatcccttttttaacgacattaaagtaactttcgggcgcatcaactgtgctaagcactgtcggcgtggtcttggtaccaacttggccagctgacccatcgttaccagtttgttgaatcgaatccacaaggtatggtttcattcgttgaccaccgtttgcgatggttgaaatgtattgtgccaattgaattaaggtgtaggcatcgtagttaccataagataaatcaagtaatgaaccattggctggctcgccatattcattgacggttggcccttcgatcccggtggcttcacctggcaaatcaatcccagtcttttgtcctaagccaaattgactgaagtagccacgcatcttcgtaaagatatctgaatccatcgttaacgaagaattgggtacatatttggcatgcccttctaacatcgctaattgcatcatgtaaatattagaagaaacttccaacgctgattcagcgttcaatgatccaaacgtcccaactgggtaaacagatttcttaaccggcgttcctcttaaatagattggtgtatccggtaaggtattattggttggcgtaatcacaccatccattaagccccccataacggtcgcccctttaatagcagaccccatgacgaaggtgtgattaatcaccccgagcgcatcatcggcaatttcacctgacttacgatcgttggattcgccagccattgctaaaatagcacctgttttcggattcatcgccacggcataggcaccatcagaatactgagtggctcccgctgcttttgcctgatcatagattttcttcaaagcagcttccacttgcgtttgataagcttggtcaattgttaaatttaaattactccctttttgccctttaaataagacattacttgagagaatctgattattcgcaccaacttcaacttgtgattgcgacttagaaccatgcaagacactttcgtattgcttttctaaataactggtcccaacgcgatcattacgcgaatagccctgtgctagcaaggagttgacgccatcttctggtaacccttgctcttcagttgaaacatgcccaataatactgcgcattgaatcgccattaggataagcccgttcccaatcggtgctgacattaatccctggcaaactcgttagatgttcactgatttcagcaatttccttatcagtcacatccgtatttttaatataaactgtcgataattgataagccccactcataattttgaaaatcgcagcggcttgtttttgttgctcgtttaaccctttaaacgactttttaaccaattcgattgttgattgataaaccttcttttctggcaactcagaaccatcactggcaaccttcgcagatttaggcagttttgcgttccattttttaagattcttggggttactgaggtagtaatcaatctgatcacgttcagttaacttatccgtcgggaccgttaaatattgggttaacttattggcctctgcatacattttgtctgccaagacattcatattcttcgtataagtaatcgccggtttagcagtattcccaactaagacacggccctttgaatccagaatcatccctcgaggcacgttacctgtaacgattttcttatcagtactgttgaccatcgcttgaaaattagcgccctccatcacttgcaggcgtcccaattgcataatcaacgcggcaaataacgcgaagacaacgaataataggaaatttaagcggaatggaatcagtgatttttcacgattttgtttgttttttctcttaatgattttcacagacggtcagatactccttatttagcgccgctctagtaaaagatggcgccgctctatgcttcaaaaagtcgccaagcgaccttttgagcgattttgtgctgtattgtttaagtttagcaaaattatcttaaacaagctatgccaaatctctaaattcaaacgagattatggtatgcttaagcatagtcattaactggttatattttacagcttttctcagttaaaaacggactagcaacctaatttttagatttttttattaattggaggattaccgtgagtcgattttacgcttttgcacgtcgtcattatacattaggccttagtttcttactaccatttggcattttatttatctacggactacttcgacaagtgttcccttttggagggcaaacaatcctgactgttgatctaggccaacaatacatcgatttttacgctttttttagaagtacgctattgcaccatcccgaaacttttttttattcctttgctaagggcttagggggcgacatgcttggggtctgggcttactatttgatgagtccattcaatctaatcgtcctattgacaccaggaacttggttgagttttggtgtttggctgcttgtccttttcaaaacaggcgccagtggtcttagttttgcgtactacttaaaatctaacaaactactccatagctggtggttaccgacacttagtgttgtctacgccttatccgggtttgcaattgccaaccagtttaacgttatgtggttggatgcactcgtctggcttccactagttgtcttaggcatcgaccggctctttacaggccgtcacttttggctttatccattgagtcttgccgcactcttaatgagtaactattatatgggctatatggtttgcctgtttgtcattacttattttgcgtgggcttgtgctcattattggcaaacttggcgccatctatggcaacgcgctgcccgcttcatcagtggctcactcttggccggtttactctcagcctggctcctattgccaacttttttccaattgacgcagagcaaagggcagtacaccattcaaaagattcattggaagttcgaatataatccgcttaagatgctttctaaacttgtgattggcaattttaacttcgaccaaatgccaaaaggcgaaccgaatatattcgtcggcagtctcgtattgatttgtgccatcttgtattttggaacacgcaagattgcctggcaagaacggttagttgccttattagtcaccattttcttaggtgtttcaatgtgttatgaaccccttgatttattatggcacggcatgcaatttccagtttggtatccttaccgcttttcatatgtggttagcttttggctaatcgtgctcgcggttcaacggctccaccagcacccccgatttagttggtatcaactcttgttgccgtttttaatgttgatggcggcttttggttatactgccaaacatctcaagagcttcaccgcgctaagtcctaatcagattaacttaagcatcgctttcttactgatgacatgcttgcttttactcctgaaaaagccgctcaagcgctattatcctttgctcttagttctatgcgtcggtggtgagatggtcaccaacgcgacaatgagtcttaatcaaattagctatgtctcacaaaaagattacgcagattatacagctcatttacaatcagccattagcgcaattccaaataaaaccgcgtttcaacgaattggcaaaacctttatgcggacaaaaaatgacccgatgcaagctgattatttcggcggatctcattttaattcgatgctcgaactgagctatccgaaattcatgggcagcattggcgaaccagctggcgatggcgccgttgccgatactaatcagaccctgttcaccgatgcgttattaggttatcgctactaccttaacaatactagtgggcaagcaacaattccactcagtacgaataagccggacttagcacgttataacttactcaaaaaaaaagatcaaattgcaatttatcaaaaccccaacgcacttgatttaggctttgcggcctctgaaaaagtgcttaaacatcatgtggttgccaattatcccatccttgaacagaaccagattgcggcagacttagtcaattcagcgacagaacagccactcttcacacttcaatttttcaatactgtcacttacaagaatgctaaacaaaaaccaaaactcaacgaaactttcctccgggttgatccgaagaatccagctcacgtcatctataccttcacacccacaacgagtgacccctattacctcacattaggctcaaacctcgaaaaaaatgcggttcaggtctcattaaacggtcacacgctacaacaatacgatactttccgcgatactgtcgtcttaaacctgacaagtaacgcaatcggccaacaacaaaccgttgaccttagcttctctaaaaaggaaatttggctccaaaatattaatttatatagtttgaattatcaagcattgacgcacctaacgcagcaacttcgtgcacatgcattgaaactgaatactttctcaaacacaaccatcaaaggaacgatcaccattcctcaacaaaaccaagtcctcatgacaaccgtcccctatgctgctggttggcatgcaacggttgacggccatccggttaaaatcaaacgcggcttgaagaacttcatcgccatcccgctgaaaaaaggtcaccataccgttacccttaaatactggccaccttatttctattggggtttgacgatttcactaatcagcgccggctttgcaattggtggttattgcagctacaaatactaccgccgccgccacttattctaaccatcaaaaaaagccccacgcactcaatttaaaatgagtgcgtggggcttttttgaatctattcagtatccgttcgtgctaaaatcagtgcattttcggaatagttaatgtttttgcgtaattcatctgcaagttgccatgaaattttatgttgttccaataactcttgaatcgccactcgttcactcgtgagcgctttgattcttaatttttgtaattgacgttcatagatagcggtcttactccgccccccatttttcatgttttcaatctgattccgataccgcacaataatttgataaataacctgacgattataatgacgttggcgattttcaggctgttttaggaaatacgacaattgtttaattcccgccttagccatttcacgttcagtcaattgccactcggtttcacttggtgatttggtatgccgcggccagagatgcgtcaaaaagcgtttgctgattgaccaagcacgatagacttgtagttgcacatgatgccaattaaaactcgtcccaataaccgataacattacttgtttttgccgtaacttacgtttaccgtgccgatagcttttagcactaatggccttttcagcccataacaactctaacttctgacgttctccgtcaaatgccacttgtcgcaaaatcaactcttcagcaattaacggtggtagttcgtcacttgtgcttgcttcgctttgttgactctccaaccggcggatcatcaactgatactctgccaataaatctaaagcagcccggttattatcaatatgccgttgggattcgaccatgctcgctgctactttgtacatgtaaatcttagcgtttgtttcatccaataaatcagcagctgcttcatcttctgcggctgcttcggcttcaagatctcgttgcatccctcgcatctcgattggtgctttgacttttgtcagcttaggaattaagacaacggccatcaccagactgacaataatcacgccggccgcaataaagagcattaagccgcgttgaggaaacggtgaaccatccgctaaaacagttggcaccgataataccccggccatcgtaatcgctccacgaaccccagaaagtccagagagcaccgcaattttaatgttttcgcggaatgttttgggattcgtctggttggtgtagagcaagtaagctagtgtccagagtccccgcacaatcaccagaatcaaccaaaccgctaagacgaggagaatttcttcactcgtattaatcagcggattatgcacggtattatgcatagcgacaggtaattcaatccctaaaattaaaaagacaatcccgtttaataagtaaacactgattgaccaagtttgttcggtcactaacttcaactccggtaaaaaatcgaggaagatattccgtgatgaatgactgatgatcccagctaccaccaccgcaatcacaccggatgcgtggaatagatcttcaacaattagatagatgataaacggtgtcaccaactgtaaaatcgtatggaacatcacatcttcaaagccttgttgtagcataaataggcgaataaaatgaatgattaacatgataatcatccccgctagtgtgccaacaatactaatatacagaaaatcgcccgcggcttgttgccatgagaaatagccggtaacagcggcagcaatcccatatttaaagctaatcaagccactggcatcgttaattaaactttcaccactcactaagtgcaaaacccggggcggtaaatcggcctgttctgaaatcgattgtaccgccaccggatccgttggcgacaagattgccgctaacgcaaaacttgcagccagcggtaacgccgggactaaccaatgaatggccaagccgccaattaacgtcgttgcaaagacgaggaaaatcgcattcccaataattggtccgcgcaacgcccatagttccttcttaggaaaacgacggccatcgttaaacaataatggtgcaacaaacaccaacatgaaccaatctgtttttagtggaatcttgacggcaaagactaacgccaccattaatcccaacccgatctcaattaaactaaccggtaaatttggcaaataatgcccgatgatattggcaataatcaccaacgtaattaacaaaataacagcttcaataattgccatcccaacaccctttctttttaaaacgctcatcctgataaaaaagccctgataaaatcatcttttaccatagcttttcatcattgatttaaccttgcttatgttgcccaataatccggacttctggttctaagcgcacattaaacttcgcccagatcgttttttgaatgtattcgatcaacgtcaaataatccgttgccgttgcgtgatcaatattcacgatgaacccggcatgttttttagaaacttgtgcgcccccaatttgatgcccttgcaagcccgctttttgaatcaacggtccgacaaaatgaccgactggtcgtttaaagacactcccacatgagggatattctagcggctgtttggcagcccgcaaagcgttgacctcatccatccgggcgcgaattgttggtgccgcacccgttgccatttcaaaataggcaaccaacacaatactgccgttatcttgaattaaactatgccggtaactgaagtctaagtcagcggccgttaacgtctgtacttgattatcgcgcattaaaacatcaacgcgggtcagtacatcactaatttcgccaccatatgcgccggcgttcataaagaccgcaccgccaacactaccaggaatgccggcagcaaattctaagccggtcaaactaccgctataagctgcttcagaggtttgaataatccctgctccagcttgcgcggtcaccaagttaccttcaactttaatctgattcatcgccgttaagatgatgactaagcctttaatgccaccgtcacgaacaattagattactagcattaccgataattgtgatgggtaatgtcagttcattggcactggccactaattgccgcacttctgcaacagatttggggagtgcgagtaaatctgccggtccacctgttttggtaaaggtgtataagctcaatggttctgcttgatgaatctcgattgcttggtttgcttgtaaaaatacttcaacttgacttgtcacaattgtcgttcccctcaaaaaataatctactcctagtttaacaaagacggcttgaattgaacagccaacactttttttgcgtattattgactagaccgttaaaatggaatttagaaatgaggaatcgacaatgaaatttatttcttggaacgttaatggcttacgcgccgttttaaaaaaagactttatgatcacttttaatcaactagatgccgattttttctgtctgcaagaaactaagatgcaagccggccaagttgaattagatttaccaggttatcatcaatactttaattacgctgaaaaaaagggctattccggtactgccatcttcactaagcataaaccgctcactgcaacttatggtatcggccaacctgaacacgatcaagaaggacgcgtgattacacttgaataccctactttttatttaatcacttgctacacacccaattcacaggataagttgaaacgattagactatcgcatgcgttgggagaatacctttcaaacttatatcgctaatttatcgactcaaaaacccgtcattttctgcggtgatttaaacgttgcccatgaaccaattgatctgaaaaatgataagaccaatcatcataacgccggcttttcagatgaagaacgagggcaaatgacaaccctcttaaatcgcggcttcaccgataccttccgttatttctatcctgatcaacccgatatttattcttggtggagttatcgattccacgcccgcgacaataatgccggctggcgcattgattatttcattacttccaatgatctccaacctaaattagtcgatgccaagattcacacggaaatttttggttccgaccactgccccgtcgaacttgacacgcaagatttattcgcttagaataagcaaactttataaaaagcgaggttcaaaataatgaattttgtcgcaatggattttgaaaccgccaacggtcaatggcatagtgcttgctcacttgcccttgttgttgtgcgcaacgatcaaatcgttgatagtttttatacgttaattaaacctgaaacttattttagcagtcgcaatacgcaaattcatggcattcatgaagccgatgtggctcaagcgcccaagttcaatcaagtctggccgcacatcgcaccatttttcacgccaaacaagttagtggtcgcccacaatgcgaattttgatattggtgtgttgaaaagtacactccaacactacgacattccagaaccccattatttagcgttggatactctcaagacgagtcggcggttgtatccgcaatttgagaatcataagttaaacaccttgtgtgataacctagcgattccactcgacaatcaccacaatgcactggctgatagtatcgcttgtgccaagattctgattaaagaagccaacgattttggcgttgaaccgctaaaagcggccaccaaattaatcggctaacaaaaaaagagcggttaacttgtctatgcagacaggctaaccgctcttttagcgaatggtggattaaagctaaattgtcattagggcttcgacaagattaacaacttcatcataatcattaatttgttttgactaatgtacgagctttgtttcgctgttaattataccacaattcggttcatcgtgttaacttattttgacttagattgaccaaaactcaagataaacaccgtactgatcacgagaatcccacccacgacttcccaggtgttgaaactcgttttcaagaataaaacagtaccgatagtcgcagctaatggttcaaaggtattcaataaaccagccgttgtcggtgtgatataccgtaaactccccaagaaacaaaaattggcgagcgcggtcccaaacaaagcaatgaataagacactgctgattgttgccacattcaacggtggaacaccgacccaaaatggatgaacaaatgtgaagaccaccccaccgattaacatcgcccagcccacaatcactaatgttggatatttttggaataacttaaccggaattaatgtgtttaaagcgccagaaaagccaaggcataaactaagtccgaatgccgcgtgtgaaatcgccaaatgtgtcagttgtccttttgtcactaacaaccacgtccccaacaatgcaacagtcactgcaattagttcaacgcggctaggtgctctacgataaatcaccaagctaattaagatgatcatgatggtgcctagctgttgtaaaatcgtagtcgttggtgcattgctggcttgaatcgttagaaaataaaaatactgaacggccgataaccctaatactgcaaataataacatccgcgtaaagtcccgcggttgccgccacactgtaaaaacatcgttcggttgtttaatgagcgcataacctaatagaaataggcctgaaagccccatcttaacccccattagccattctggcttaattgccgtgtcagtgaatagccactgtgatactggcccttgaatcccccaaaatattgatcctaatacggctaagtaaattccgcgtcctcgttgttgttgcatcttaaatctcctcatccatattcattaattggcacatttgcacaaccggaatatagcccgtttctggcgcataaaatccggctgctaattgtgcttcggtcacaaaaccaaaccgtttgtaaagtgcaattgcacggtgattacgggcttgtactgttaactcaagccgtcgcggatttcctatttctcgaaccgacgctaaaaggtgcgccatcaaatcagagccaattccgcgatgccacttcgcttttaaaacagcgatactaacttcactgatatgtgttatcccctgttctgtcggactattcacacgaattgccccgacaatttgctgttgatcaaaagcaagcaataatacatcttgttgcgattcaagaatacttgctatcaaaaattcagtaaataatggtgttaaagtggctaactccgctggtaacgcaacataccgtgtttctttagcgaccgcctttaaaaagcataaataagcccgcgcatctgctgcttgcgcgggccgaatgtcaactacactagtctgcaaaactagtacgcaccaatgcttcgtagtgagcgccgtgcggatcaagtactaacgtccgaacttgatcatcgctaacatccttattaaaatgaatcgtcaaataatcgctcggtagttcttcagcaataaattgactccattcaaccaccgaaaccccgtccccatcgaaatactcttctaagcctaaatcactggcgcccgtttcttccaatcgatacacatccatatgatagagtggtaaccgaccgtcttgatactcacgaattaacgtaaatgtcggactcttaatatagcggtcaattcccagaccagctgccaagcctttcgtaaacgttgttttaccagcgcctaaatcaccatccaacaacaagacatcaccggcttggacttgttggcccaactgtttggcaatcgcaattgtttgttctggatcagttgttttaaattctaacatgttctgcctcattctaattgttatctgtgtgtcattataccgaaaaaagccctgttcgcaaagtcaaagacgccagcacaatttttctgtgctggcgtctttgttgtcggtcaattagttttgtaatgcttgagcagccgtaatgatggctaacttgtaaacatcttcttcgttgctcccacgtgataaatcagaaatgggttgattcaaaccttgtaaaattggtccgatggcttcgaaattcccaaaacgttgggcaatcttgtagccaatgttccctgattgtaattctgggaaaacaaacacagtggcttgacccgccacttttgaatctggtgctttttggttcgcaacaactggtacgtatgcggcatcaaattgtaggtcaccatcaatgtctaattctggcgcaatttcatgtgcaatccgtgctgcttcttgaaccttcgtgacttcgtctgctttcgcagaccccatcgttgaaaagctcaacagcgcaactttcggatcgatatcgaacaactcagccgtctttgcagattccacagcaacttcagccaattcttgcgcattcgggttaatattgatggcgcaatctgagaataagtaacgttcgttatcgcgaccgcgttgcataatgaaggccccgcttgtgcgttggacacctggttttgttttaataatttgtaatgctggtcgaacagtatcgcctgttgaatgcacggcacctgaaaccatcccgtcggctaagtttaaataaaccagcatggtgccaaaataattaggatcttgtaaaattgtttgtgcttgttcaggggttgccttgcccttgcggcgttcgacaaaagcggcaaccattttttcaaagtcagctgttggatattcttgtggatcaataatcgttatcccgtccaagttaaatcctttagcagcagcgatttgttgaatatcattcgttgccccaattaaaatgggtttcaaaatccgatcagcattcaaccgtgctgctgcaccaataattcttggttctgttccttccggaaaaacaattttaaattgccgattggtaatctttgcttttaagctttcaaataaatccacaattgcaacctccagtaagcattttattattgctaatgtaatcatacaacgtttctaataccgcgacaagtcaacaatggtaacgcttcattattctaccgtgactgtttgtggtaattgccaattaattggcgccatgccccattgctcaagggcagtattcgtctgtgagaaaggtttagagccaaagaaaccatgataggctgacaagggactgggatgtactgcagtaatgaccgcattttgcgtctcatcaattaaccgccgtttatcctttgccgcgtttccccataaaatgaagaccacatgtccccgatttgacaatgcagcaatcgccgcatccgttagctgttcccaaccttgtttacgatgcgaatttgattgacctgcccgcacggtcaatacggtgttcaacaagaacacgccttgatccgcccaactctttaaatagccatgctgaaccggttgaaagccaacatccgtctgcaattctttataaatattttgcaatgatggtgggactttgacccctggtaaaacggaaaaactacacccatgggcttggttcgggccatgataaggatcttgtcctaaaatgacgactttaacctgttcaaacggtgtccattcaaaggcttggaaaatatggtgcatctctggataaaccgtggtcgtttggtattcctgtttcaaaaaggtatggagctgaccataatagggtttggcaaactctggtgcgagaatcgtttgccactcattgtgaataattgttttcatctgctcacctcattaactagtttatcgtgttttaacataagttgctagaagaaaagtagcttgcatgctaagatagaggtaagtttctaataatacgttttcaggaggaattcctttgatttcaattattgcatctgatatggacggtaccttattaaacgacaaaatgcaggtttcagacggtaacatgaccgccattaaagctgcccaagacgccggcatcgaattcgtggtggctaccggccgcagtcgttctgaagccctccccctaattgacagtgatgacatccaacctactttaattacgatgaatggtgcccaaatttttgattctttaggtaatgaagttttgaatgtgccgattgattccgaaacggtgacagccgtcacagaaaatttacgcgaaaataatatttacttcgaactcatgacgactgccggtaattattcagatagcaaagtcagtcgcatccaaaatgtcgctgatttactcgtcaacctcaatcccgatacgagttataaaattgcggttgctttagcagcagcccgtttggaattaatgaatattaactacgtcgatgatcactatcaagggattattaacgatccaacggttaagattcttaaaatcatcgcttttagcacacagggaatgaccgaattagcaccaattaaggcattttgtgaagcccgcggggatttagttgtaacttcctcttcaagtaataacatcgaaataaaccacattgacgctcaaaaaggtatcgctttggccgcctatgctgaacaaagagggattccagttgagcaaacaatggcaattggtgataacttaaacgatttttcaatgatcaaaacagctggcattggtgtcgccatgggcaatgctgtcccaacaattaaggaacttgcgaactatcaaactgcaactaacattcaagacggcgtcgcacaagcgatttatcacgcgattgacttgaatcgtacagctgaaaagaagtgatctttgatgcctattttctacattaaacaccaggctagtgcttcacgtggtgtctcaaccgtgattgacgatcaagaacaaccgcgttatttacttattggaaagcgtgggattcggcatgacgtattcagcctttactcactcaccggcgacttactcggtgaaattcgccaagtcacaattagcccctcacctgactttgaccttttccaaaacgatgaacggattggtcaactcaaaaagatctggggcgtctggcatgagtttatctatgtcaaacaacttaattggttaattatgggagatttaacgcaaaatcaatatcgcattatctaccatacacaacccatcatgcaagcgaccaccattctagcaagcagcggtccagcctttcaattgactgtcaaccaagaaaaggatatcgtcccctgtattttgattgccgccgttttaaatcattgggcctataaccaacccaaggcactgattcggcgttttaagcctagtttgcgattcgaatagtcagtaaaaaaacgactaatcaaatgattagtcgttttttggtctagctcaagactcccatcgaatatatataagcgctaacatttaaaattaaattgattcttttcttttaaattggtatagttgaatatgcaaacttaaaattaaaggggtcttctcaatgccaactggcgtgattattaattcattatccgtcttatttggcggtctattcggtagtttattgggagataaattatcaactaaatttaaaacagaactcaccttaatcttcggtgttgcttcgatgggaatgggcatcaatgccattattcaaatgaagaacatgcctgcagtcatcttcgcagttgttctcggtactgggattggcctactcattcacttcggtcgctggattgatcgcggtgccgtcttgatggaacggccaatttctaaatttttccgcgtaaaaataatacgctatcagataccgaatttatttcagcactcgtgacagtgattgtcctcttttgtgccggtgggaccggtatttatgggacattagatgctggtatgacaggcaacaatacgattctaatttctaaatcaattctagatttctttactgctgccatctttgcctgcaatcttggccccgtcgtttcaaccattgcgattccgcaattcattatcttttacatcattttcttactcgccaaactcattttcccactaacgaatccaacaatgcttgcagatttcaaagcttgcggcggcctcttgatgctcgccactggctttagaattgctaaaattcgcgaatttccaattgcagacatgataccagcaatgatcttagtcatgccactgagctggctatggacgacaatgattatgccattactttaatctgaaaagagccgacaacaattgttgtcggctcttttcgtgttaaagctgtttaatcatatgatcatattgatgatcaccaatcattaaatctccttgtttaacaaaacccattcgttcataaagttttttagcgccaggattttgtaaatccacacttaagctaatctttttttcaccacgtgcttttaaataatctggtaaggccttaagtaactttgtccctacaccatgcccctgtgcatgttcagcgacggcaagtgtatctaaataccattcccccggttgtgcttccttatcggtaaagaaacgcgttgtctcaggtaagccgatttgtgggaataacggtgctaatgcatcgtcgatatgggcttccttttcttctgggaagcctacaacaatccccaatacttggccgtcttcttcataaactagtgtgttagcataactataccgatattcaggcattgcaaaggcctgttctaaaataccaaataaatcctccaacggaatcttttggaagagtggcatttccatttcttcaaaaacaatgttaatgattggtaagacactcttggcatctgcaactgttgcttgacgaatcattcaaagacctcctctagtaatctttttatcatacggaggattgcatagcacgtcaactgttatcatgctaaatcagaccggtagtcggccattttcttagcaaataactcaccattggtcggtggcgtgtacgtcaatgcattcgcacccgcttcaatcgtcgctaatatactagcttcgtttttacccccagttgccataatcggaatttcgggatattgttggcgaattgcactaacaattgctggggttttagccgcgccactaacgtttaaaattgaaactccagcttcaatctgcgcggcgtaatcctgttgttctgacacaacagtacaaataatcggaacgtcaacaacgcggttaatcattttaatcgtctccaccgaggtcggtgcgttaaccaccacgccaatcgaaccggcggcctctgccaataatcccatgtacgcggaccggctgccggccgttaagcccccaccaatcccattaaaaacggggatcgtcgccacattgctgatggcattcatgacagctgggtgtggtgtaaatggataaactgccaaaacagcgtcagcatttgtattattcacaatcgcaacatcggtggtaaaaataattgttttaatcttcttaccgaggatcttaatccccccaacttgtcgcgccacagcaggtggtccgacaacactggtttttaatggtgtataaatctctggtacgaattgctctgtcatccgaatccccctctttattctgttgctttaataatggctactaatcgttgttctagcacgaccaaatcaattgcatttaatcgcgcaaaattgatgcgcaacgcatctgttttaagcccaaataatgatcctggtgcgacagcaagctgatgatcaataaaggtttttaagcgtaatttatggttcggatgggtcacccaaatataataacctcccgctggtaagtaaacgtgccaatcgggtaataccctttcaagcatcttataggttgcttgtgcacgttcttgaagcgtccccttaagttgatccaactgcgtttgaaattgcggatcccccatcgctaaggtcaccatgacttgcgccataatgcttggcactaaatccatttcatgttgcacacgggtcaactgttcgatgacttgcggagtagcagctacccacccgattcggctactagcccccataattttggacaacgaactaatataaataacattatccggatcaagttgctttaacgttgggattggcctagttgtatcaaatcctaaccaaccaaagacatcatcttctacgattggtatttgatgcatctggcataaatgaacaactgcttttcttttttgaaaactcattacgtgccccgttggattttgataatctggattgagaataaccaacttaacacggtgcttaatgattagctcttctaaagcagtcaaataaatcccatcagcatcaactgaagcttcatagacacggacacccgtcgcttcaaacaaagttgagtcatgaaaaaaggagggtgattcaattgcaacagcatcacctggcgtcaataaaccctgtaatattaaaaagagtgattgttgcacaccggcagtcattaataactgctcttcggtaaaaaatagccgtttattgtgttgatccaattgattaattgccgtaataagtggttgatagcctcgtggtgtctctaatgcttgtgcagtaataaaatcttgccacgtcaatgcaggaaattgaaattgtgggactaattctaatggtaagtcacttgaataaacatcaattaacttttcaggttttcgtctaatcagttgttgtaattggcgccgttcattttgactttgtgactgacgttggctgatcaaataagtatgccaattgacccgccttgcctgtggtcgcgcttgctggctgacaaacgtcccgctaccaacgcgacgttcaatcacgccatctgcaaccaattcatcagacgcacgtgtcaccgttgaacgattgacactcaataatttagctaactgacgctctggcggtaattggtcacctgaacttaattgtcctttatctatcaagctaataatcatttttttaattgccatatactttggcttttgttcaggtaaatattgtaaccattcaatcatttttaacacctcttatttagtttacaaattggatggtaaaaaaacaagccaattggctgttgttgaacattctattcttctctatgatagttaagaatagaattttggaggacaactatgcaaaacattctaaccattgccggctctgatactctgggtggtggtggcatccaggccgatttaaaaacgttcgaagccttagaaacgtttggggtcagtgccttaacttgcatcgctacattgctaccagacggtcacttgaaaatccacaacttacctgaggataccattttggaccagcttgatgccattttaaactacgtgccactaacgcacgttaaaattggtttggttcatcaaacggaaactttaaaagccatctgtgagcgactacgacagcatcctgaattaaccatcatcgctgacccggtcctcgtctttaaagaaggcgccattcttgcgcagcaagcgtacctcgacacgttaaaaaaagaactactgcctttgacgagcgttgtcaccccaaacttgttggaggcccaacaactcagtggtctttcgtcaattaccacgcgtgaggaaatggtcgaagctgctacaattatccaatcatttggccccaagcacgtcattatcaaaggtggtcaacgattccctggtgagcaggccgttgatttattaaaatcgggcgcaacaactcattatttagaagctccacgattggaaacaactaccattgatggcgccggttgtacgctttcggcagcgattgcggcggaattagcacaaggaaaatcgattgaagttgccgtggcacgcgcaaagaaatttgtttatgccggtttaaaagatggtattcatctacgccatggcctggggaatgtctggcagggggctactaaacatgcactttaataaacgtcaattaccattactcgcgatgctcaccgcattgaccgtggcactctctttgttaatcatcatcccgattccggcgacgaagggctttgtgacgctctgtgaggtcggtatttatacaacggcgatcatgctgcgaaatcctggcggactcactgtcggagccctgagtggcctattaatcgatctattatctggttaccctgagtggtgtctcttctcactcatcattcatggggggcaaggcttcgttgtaggtcacctgactcgtaatgattcaatgcgaccaaagcagctgattatccccctcatttgcggtagtatcgtcatggttgccggttactttttagctaccagtttacttttcggctgggctgccggaatcgcttcgattttcagtaatattgttcaaaatggacttggtatcgtggttaccatcccgttagtcactagtttatcccgtattcgaccacaattatttaaccactaggagattttttaaatgacaaacgaattacaattaaaccaaattcaacaagacttaacaaagatgactcaggatgttctaaacgaagcacacttaggaaatggtgatttgttcgtcctcgggtgttcaacgagtgaagtcgtcggtggtcatatcggtaaggcttctagcaaagaagtcggtgaagtcatcatcgcaacacttcgtggcattctcaatccattggggattcatttagccgtgcaaggctgtgaacatattaaccgtagtttggtgattgaacgtcaggttgcccgcgcacacgactttgaaattgtctcagttgttcctgctatgcacgctggaggcgcctgctccgtcgctgcatttgaacaattcagtgatccggttgaagttgaacatatcgttgcacaagctggattagatatcggtgatacggcgattgggatgcacgtgaaattcgttcaagtccctgtccgcccaacccttgatacattgggtagtgcacatgtcacagctttacggtcacgaccaaaatacgttggcggtcctcgagcaacatatgcaccaactcattaaacgcaaaaaaagcctcgttctttgaacgaggctttttgaatattatttattcaaccgtgacactcttagctaggtttcttggctgatctacatcataccctctatgcaaacttgcatagtaagcaattaattgaccaggaatgatccccaataatggtgtcaataagtcgtttacggttggtaaaatgatctgatcatctgcttcagcagattcttcgctgacaatcgtcaaggcttttgccccacgcgcagtcacttcttgtaagttaccacgcgtgtgcgcaatcgttttggcatccattaagaatgcaataacgggtgtcccctcttcaatcaaagcgatggtgccatgttttaattcgccggctgcaaatccttcagcttggatgtatgaaatttcttttaacttcaaagcagcttctaaactcaaggcgtaatcttcaccacgaccaatataaaaggcattgcgtgttgtttgtaagtaatcagtcgtcaaggtttcaatctgttctttttcgctcaataaagcttccatgccagtagcgactaagcctaattcatgatgtacatcgaattgttctgctagcaccagttgattgtggcgtccgagtgcaacagctaagaataattcaactgcaatttgtgcagtgtaggctttcgttgaagcaaccgcaatttcggggcctgcatgcaataataatgtataatcagcttcccgtgaaagtgttgacccttggctgttagtgatggttaagcttggataatgcaaggcattagtttgtaccaacacttggcgactatcagcagtttcgccactttgtgttaaaaagataaagaatggcttttcagataatagcggcatgtgatagccgaattcactagcaacatgtacttcgacaggcttgtgcgttaatgtttcaaacaaggtcttcccgattaaaccggcatgataacttgtcccagccgccacgatgtagaggcgatctgcatcattcattgcactgagtaacgctgagtcgattttaagctctccatcaacagcaacgtattcgttcaataaacgccgcataacagctggttgttcgtcgatttcttttaacatgtagtgggggtatgtgcccttgcccgctgcatcagcatccatttcaacatgatagctttcgcggtgaataaaagtgccgtctaaatcttcaatttgaacactttgtttcgtgagtgtcaccatttcacgatcatggatttcaataaaatcttttgtttcattcaacatcgctaatgcatccgagcacacaacgttaaagccatcacctacaccgattaacaatggcgatttattcttagcaacgtataaggtgtcaggatcatcacgatcgaccatgacaaatgcgtatgagccttcaatcaacgttaaagccttccggaaggcttccttagctgataattgttctgtcttagcaaggtaagcaatcaactgaacagcgacttccgtatcggtttgactgacaaaatggacatcctccaagtatgtttcttttaaagctaaatagttagttaacacgccgttgtgaaccaagtaaaaacgaccatcttcagaaacatgcggatgcgcattatcacgactcgcaacaccatgcgttgcccaacgcgtatgaccaacaccgattgttccttgtacttcaggcccaaccgctgcttctagaacgctaattttaccgggttctttaactaagtagtcatgcccagtttcgctgttcacgtaaatgcccgctgaatcgtaaccacgatacgccaacttctctaatccgtttaataaaatttcagttgtcttttcattgccaattacgcctacgattccacacattataaaaatcctcttttcaactttggtttaatattctttaatcaattggtacaacacttaaatataatagcaccaacgattttaatgtcaacatttttattggtatatataaatttataattttggtatagtccaaatattttccgctatctagcgcttttatgctatactaagaccagtcaattttagaaaaggagtttctgtaatgaaaaagagcatcttgttaattcgaagtatttctcttcttggcctattagtcggactgagctttatcgtcgttgcacctaaaacaatcgccttacatattgccgccaataacattgtcgattcaaccggtagcaaatacatgctactattagaacccgctttattaatcatcgtgaatgaagtcagtgttttcaatctcaaacgttaccgcaaaaattatcatttgactgatgcacctatcatacttgtcaaagaatggtatctgatatccgctgctgttgtcttattggttgtctttggttttctgatgtacgaacaagtcacattgcgttagaagaatgggctcttaaataaaattgcaccaaaaaaacccgtcaacacaatgttgacgggcttttttagtttgattcaagtgagaacgtgcttttcaagctagtgctcaaaagttgaccaacttgaacgcgcttctcgagtagtcatttccggtgaactgcaaaatgggaattatggcaagaaacaccataacccccattttactgttaatcctcaaagcctaaccaactcgcgtcagcactccctttaattatgcgccaatttcagctttaacaaccgctgcgatttgatcagcatattgatttactttttcttctgttgcagcttcacacattactcgtagcaatggttctgtcccacttggacgaaccaagacgcggccatcaccattcatttctttttcaacggtatcaatggcagcttggatcttgtcatttgttaaccaagcatccttgtccttaactgttaagttaacgagtttttgtgggtaagtttgaacaggggctgctaattcagataacttcttaccagtttgtttcatgacgtttaagagttgaatcccggttaacatcccatcacctgtattgtggtaatcaaagatgatgatgtgtcctgattgttcgccaccaaggttatagcctttttcacgcatttcttcaacgacgtgacgatccccaacgtctgtttggactgattgcatgttgttggcttcaatcgctttatacaagccgatattactcataacagttgtgacaatcgtatcttgttttaaacgacccttatcagataaatattgaccgagaatgaacataatcttgtccccatcaataatattacctaattcgtcaactgcgatacaccgatccccgtcaccatcaaatgctagtccaacttgcgcgcctgtttcaagcactcttttagcaacattttctgggtgtgttgaaccgacaccatcgttgatattcaaaccatctggatgggttgccgttgttgtaaattctgtttctagatcagcaaatacgcggctaattaaaccactggttgaaccgtttgcgccatccaatgccactttaatcccagctaaatcatcaggaatcgtatgttctaagaattgggtatacttcaaagcaccttctggatattcttccaccgtccccagaccagcgccttctggacgtggtaaagtatcttcttcggcatcaataattgcttcaatttcttcttcagttgcgtctggtaatttgtaaccatctgcgccgaagaatttaatcccattatagatagcggggttatgtgaggctgaaatcataatgccggcacttgcttcttgaaccttaattaaataggcaaccgcaggtgttgtcaccacgcctaatgataagacttcaatcccaactgataataagccggaaatcaaagattgttctaacatttggcctgaaatacgtgtgtcacgagccaccaaaacctttggccgttgatccttatcagcgtgcttggtcaaaacgtaaccacccgcacgtcctaatttaaaagccatttctgggcttaattctaagttggcaacgccacgtacaccatcagttccaaaatactttgtcatatttaattatctccattcatcctgctaaaatctttagcgttgattattgatttacatcggtatttgctttactactttcacttgagcttgattgactacttgattggctgttacttgaacttgactcaacgggcgcactacttgatgtttgtgccgtactttcagacggcgcttcaacagtactagtagcactcgtattggtcgtatctggagtcaccgtaattgtcaccttaatggcacttggcgtactctcataaatgttgtctggtaaagccactttaaccgtctttgaagttgaactcgtgattgacgataaatcgacactcactggtaacgacgtcaacttggctaaagctgtttgacgaccatacacggtcactgaatcagttgttgatgacagactgtagctgtagccacttttttcaccggtcttttccaaactaatcgggagtgttttcttactcatttgaaccaatatcttaacgttaacggtttgtggtgaaattaaaacatttaacgctttcccattgcgatcaacagcttgcaacaagacttcttcattgatgtcttttttggtgccttcatcgggatcaacagtggctactacttgcgacacagcattcactgctgattttgcaccactgacttcaaccacgtcttgacttagttttggatttcctagactatacccggccgctaagttttctttcttaacattgacctgcacagggaattgctttgtcactttgtgctcaatgtggaccttaatttctttaggttcaatcgtgactttgatatctttattaatccccgtctgttttaacttgacggtgtgatcaccaggacccagcttcgttaaatcgccaatcacgcggaaatttaatgtgttaactgctgatgtgactagcgcattcggcccggataatttcactttgaccttttgtggatagccggtaatgaaataccgatcagtatccgcattaatctggagcggcacttttacggtttccgtgcgggttgctagcatctgtgtatcattgttattcgtctggcgcgtcgtgttaatttcatccaaattgacataaccaaacagtaacaacgctagaaataacgctaaaattcgatagagccatgggccttcaacaaactttttcatcatttctggcctccttttttgaagccatcaacaaattcttgtaagagactcgttttgttttcctcttgggtaatcaaatgcgagttgaagtacttcatataatcatcacggcttaaatcacgcattaactcgttattgcgcgttaatgtgacaccaccggtttcttcagaaacaacaatcgtcaaagcatccgttacttcactaatcccaacggctgcccgatgtctggtccctaattctttgggaattaaattactctctgaaagtggtagataagcggccgcaacggcaatcttatcatcgcgaattatgaccgccccatcatgcaatggtgtattcgggataaagatgttaattaataactcccccgtcacatccgcatccaaatcaatcccagtttcgatataatcttccaaaccggtattcatttgaattgtaatcagcgccccgatacgccgtttcgacatatactgaatcgacttatcgagggctttaattaaattattttcttgttcaattttgggattaacgccgcgtcgtagtagcgatccacgtccgatatgttccaaaccacgtctaatttcgggttgaaaaataacgatcaacgcaatcacaatccagctgataaattgatccataatgtacgaaacagttcgtagaccaatgtaccaactgataaccttaatcagcgcaatgactataatgcctttaaacaattggacggctttggtaccgcgaatcaacatgattaatttatacacaaaataccagacaacgatgatgtctagcacatttgcgagcatccgccacgttaataactgtgaccattcaaatgacataggtaacctccatccaaaaaaattctgtatctattataccatgaaccatttcaatctgctcattgtacttttaatgttgcattttaaactctaaaaataaatcattataacggccaaccgcagttggtgataaatcactataaacttgcaagcgatcgatcaccttttgacttggataatagcctgggttattccgtgttgctgctggcaagagtgctttggccggtatattgggcgttgaataaccaatatattcagcattttgagccgcgtttttgggctctaacataaagtttaagaaggcataggccgccttttcatgttttgccgtcttgggaatcactagattatcaaaccatagattgctgccctcttctggaattacatagtgcaaatggggattattatccaacatctcggcagcttcaccggaccaagtcacagcaacactcgcttcattttgaaccatatacatcttaatttcgtcagctacaatcgctttgacatttggtgccatctgatcaagcttgtccttagccgcctttaaaaccgccggattcgtgctattgactgactggccattttcgatcaagcccacggccatcatatcccgagcactatcgactaccataatttggccgcgataatctggtgaccatagatctgaccaatgtgtcagtggttttttaaccaattgatcgttgtagataatcccgagtgtgccccagaaataaggcaatgaatacttattcccaggatcaaatgattgattcaaaaaatccttgccaatattttgatagccggttaagcgacgatgatcaatcggtttaagtaagtgtgctttgcgcatcttttcaatcatgtactcacttggcaccgctaaatcgtaagcagtcccaccctgcttaatcttcgtgtacatcgcttcgttgctatcaaacgtctcaaccgaaacatgataaccagtttgcttttcaaactttttaataagtgctgggtcgatataatcgccccagttatataatgttaatgtattatttttcgtataaccttgtgatttttgtaattcaaccgtcccaaaccaaagggctgcacagaccactaaaatcgctaaagtgatgcgtcctaatttattcattttaagcccccgctttccgtttacgccgtgctttttgggcttggcttctttgattcaataaatagtagccggccacaaggattaaggagaagacaaacatcaaggcagataatgcgttgatttctagactaattccttgacgcgctctggagtaaatttcaacggagagcgtttcaaacccgttcccagtgacaaagaaggtcacggcaaaatcatctagcgaataggtgaacgccatgaaaaagcctgcaaaaatgccggaactaatgtacggtaaaataactttactcaggacttgccagtcagtcgcacctaaatcacgtgccgcatcaactaatgctggccgcatttcatttaacttcggcaaaaccatcaagacaacaatcggaattgaaaaagcgatatggctcagtaaaactgaaccaaagcccaaaccaaaacctaagaacgtgaagaaaattaaaaaacttgccccgataatgacatcgggtgaaaccattaaaatattgttcagcgataaaatcatattgcgcacacgccgttgcttcgttgaataaatccctaacgccccaaacgtccccacaatcgtcgcacataaagatgatagaatcgcgattaataacgtttgtaacacaatttcaatcatccgagtatcttcaaacaaggcctgataatttgcccaggtaaatgccttgaagccattcatattatccccactgctaaatgaatagaaaatcaaatagaaaatcggtgcgtacaataagacagagacaagcactaaccaaacgttttgccatttcatttttttcatttgttagtcaccttcttctttgctttttgctccccggttaccagcatgattaagcccatggcgacgattaagaccaccccgatggtcgagcccattccccagttcattgttgtgaggaagtgttcttcaatcgcagtccccagcgtaatcacgcggttacccccgattagacgcgtcaacatgaataaggataacgatggaataaagatggcctgtatcccggctttaaccccagccattgttaacggtaagatgactttcgtaaaggtttgccaattacttgcgccaagatcacgacttgcattgaccaatgatggattcaattcttctaaactattaaatatcggcaaaatcataaacggaatttcaatataggtcgccaccactaagaaactgaaattcgtaaataaaatctgttgtggcccaatcccgaaccaccccaaaaaatgattaatggcaccatcttgactaaaaatcccgataaacgcataagctttcagtaataagttaatccatgtcggtaaaataattaataatagccaaagttgtttatgtttcgtttgatgaagccaatacgccgtcggataactgattaatagcgtaatcagcgtaattaaaaaggcgtaccataacgaatttaatgtcatcttcaagtaagtgcctgactggaaataggtcgtgtagttgaccaatgtcgcatgcccattgatatcaaagaaggactggtacacaatcaatgcgactggtgcgaggacgaacaaaattagccagagggcatatggtaagtaatataaccattgttttttacgcaattgccttagtcctcctcttcgtaactttcaagtcgtgcatcgaaatcttcttctgattccccaaaacgcatgatgtgcacgtcttctggttcaaagaataagccgactcgttgaccatctttagctgggttagttgaatgaatcaaccaccggttttgatccgcatcataggccgtaatttcataatagtcaccacgaaatagctgcgtatcaaccgttaccactaattggccttggtcaacggcaacaatgtctagatcttcaggacgaagcaccacttcaactgcttcgttgacccgcatcccggcatcggcacattcgaactgcttgccgaccatttcaacttgataatcagcaaccattttacctggcagaatgttactttccccgataaaatcagctacgaaatggttgatcggttcgtcataaatgtcgacaggtgtcccactttgcaacacgcgcccttcgttcataacaaaaatttcatcactcatcgctaaggcttcttcttgatcatgcgttacaaataagaacgtaatccctaatcgttgttgtaaatcgcgtagttcatattgcatatcttttcgtaatttcatatcgagtgctgatagaggttcatctagtagcaagacttttggttcattggccaaagcgcgcgcaatcgctactcgttgttgttgcccacctgataactcactaatttcgcgattctcatatccggcaaggcgcaccaatttaagggcttcaatcactttttctttaatcgctgcttttttaactttacgtagatttaacccaaatgcaacattctcaaagacatttagatggggaaacaaggcataatcttgaaaaaccgtattgacttggcgcttattggccggtaaatcgttcatcttctgcccttcaaataaaacatccccggcagacgcattggtaaatccggcgataattcttaaaatagttgtcttaccacagccagacggcccaagtaaggtataaaacttacctttttccaacgcaatgtcgatgccctttaaaatttggacatcgtcgtattctttaatgacatttttaaattccaccattggttgttgcatcttcttcttcgtcccctttatctttagcactctcagactcgttattagttgactaatatcctattaattataccgtttccgagacgcaatgccaattcaaagcgaacattgttgtataatggagttaaataattatttagaaatgaggttgtaatcatatggtcgcctatcaagcactcgttttagaacaaaccgatactactgtcagtgccacttatcaaactaagttaacgccagacctcgctaaagacggggtgttagtcaaagtcgcctattctgatattaactacaaagaccggctcgctatgaatcctaaaagtggcgtcttacgtcactaccccatgacacctggcgttgattttgctggcgaagttgtcgaatcggataatccgttctttgaagcgggcgatcaggtgttatgtacgggttatgaaactggcattacaatcgctgggggctacgctgaatatgtcaaagtccctagtgaatggctctttaagttgcccgaaaatcttagtcttgctgaaacgatgcagtttgggacggccggtttcaccgccgcaattgcgctcagcaaattattacgccaagcctttacagccgatcatgacaccccactcttaattacgggtgccactggcggagtcggaagtttcgcacttaccatcctcgcgcagcttggcttcacaaatctaaccgcaactacgcgtgacttgcaacaaaccgattatttattgcaccttggtgcgacccatgttattaatacagctgacctaactgctggtccgcttaaagcgctcagccatcagacattcaccggggttattgatacgcttggcggtcctgttttagcccacatcttaccgcaagtttgtgccggcggattcgtagcaacttgtggcaatgccgctggtgcaaccctagaaacaacggtgatgccgtttattctacgtgggattaccttagccggaattgattcagtctattacccgcgcaaagaccgtaaagaactctggcaattactcgccacgacgtttaaaccggaaatttggccaacagttaacttggtcgccttttctgatttagcccgagaacttagccaaaagacgcataaaactgggcgcgtactggtcgccttttaacccaaaataaaaagccccgctaaatgatttggcggggctttttatcgtctaacgacgttcaaattgatacttaggttcttcaagctctggatcgtaatcaacctgtaaatcataatcggcaaaaaaccattcgtccgattgactcgcaaaataggtgataccatctttaacaaccgaaccaattggctgctcaacagtagcgcgttccatgcccaatgaaaagccatcatgcacggccgtttgaccatacactttgccaaaaaagcggactgcatcccccgattgtaaggctaattcgtcgcgaaaccattgacttgctgcatctgacacctgaatttgcatgttgaactcctcctgattaatcgactagttggttcttaatcgcataaattgccgcttgggtgcgatcatccacttgtaacttcgccaaaatatttgaaacgtgcgtcttgaccgtttttaacgtaatgaataattcatccgcaatctcttgattactacggcctttggcaatcaagcctaagacttcacgttcgcgattagttaagtcttcatatagcttaggttcagccggatgtgttaagcgattcatcatcttattcgtcacttctggctctaaaaccgattgtccttgcgccgttttacgaatcgtattggcaatttcctcggctgtagaagtttttaatatgtaactggccgcaccggcttcaatcgccggataaactttctcatcatcgataaaactcgttaagataatgattttggcttcaggccacgcctttaaaatcgttttggtggcctcaatgccatccatctcaggcatcactaagtccattaaaatcgcatcaggacgtaatgcaagcgccttttcgacaccttctttaccattgacggcttgatcgacgacatgaatatcgtcttgaacccctaaatacgttgagatgcctaatcgcaccatttcatggtcgtctactatcaatacattaatcacttaattggtctcctttaatagtggcactcgaatttcaacactcgttccctggttaggtaaactaataatttttgccgtccctccaacactatgggcccgttcgacaatgttgtttaacccataactgccggctttttgctcagcattcgtatcaaacccggtcccgtcatcaattacctttagtaaaacactctgaccgagttgtttcaagtatacttcaatctcttgggccttcgcatgccgtagtgtgtttgacagcaactcttggacaattctaaataaattatcttcgatgccacttggtaacgttatgctatcaatgtcccatgtaatctgaatcgcaattttggtcttcaattcgttcaataactgaatgatcccatcgcgtaaactcttgccttccaaattaactggtcgtagatgcaagagtaaggcccgcatttctgattgagcctcatttaacacccgttcaactgtcgttaaggactgcaacatctgcgcgttatcagcttgtttttgcgcaacttcactgagtgccgacaacatcatcgtcgccgcaaatagttgctgactcactgaatcatgtaactcgcgtgctaaacgatgccgttcttgcgctagaatttcttccttggtttcaccagcaatcacggtcggccgatcactataactttgaatctcttgttgtaagcgtatcattttttggcgtaattgttcaactgtttgctcgattgacatcgcgtagtcattggtttcgctctgtctaatctgaaaaacaggcgattcatactgtccagaaagtaaaaattgtaactggctttcagtatgggataattgcttacgtacgacaagatagacgattgcggtaactaaaaagcctactgccattgcggccaccacaatataaacaatcagtggtacatagaataattgcttcgtggccaaactaatcagccattgttcctgatgcgtactgtagaaatacgcaaaaaataacgccactgaaaacagaagcgtcaacaaactcgtgctaatccatataaagctccgcgttaacttgctcatactaagatcacctcaagatcaccaatcattacgttggtaatgattttaaggtggcgactttcttcatcatagtttgtactatacaactgaatcgactcatttttcaaattatagtgctgattgtcgattgtcacactccctaacattgcagagtgatcaagatagacaccggtcccgacaggcactaaaatccgtgtctttccaaaccccttacggatgacaatatggttgtcattcttgggtaaaatggtgctccctaaatcgataattgtatcaccggcagcgaccgcgaagttaatatcatcccattcaaaaatgttattgccaattgtctgatgaccaaaccaactatgccgcttgactgttgtctttttcgcggtgggttccgtcgtattaacgggaataaattttttcttgcgccaaggggcattatcaaacaactgattcatattgcggctgctaaactgtcccattcggctatgatttaaggctaaaaagacgaccgcaacaataatcattaaccataacgagaaattaattaacagtggtaccgtaacagctacgcaaccgaccatcgttaacaaagtcgtccagacaccgattttacctttactacgacgtttgttggcccagactaagagtaaaatacctgcaatgatgaacactaaatttgcgggtatcgtaatcatctgccaaatgaacgtcccgaagataatcgcttctattattaaaaaaacgcgccagataaacggcatatttacggtctcctttcaactgattaatattattatacaagcaaaccagataaacaccaatccgtctcaaggctgattaacgaattaacggcaaaataaaaaagccacgggattgatttccgtggcttttttgaaacgtgctttttggctgcaacaacttctgcttaatctaaaattggcagtcatcctaaaatctggatgactgccaattttgtattaatgctcagttgctaaccgcacccaaaagcactctattcttaaacgtgctttttcgaacaaccttttccggttaactacaaaacgggcgtcatggtcaaaattcgaccataacacccgtttttacgttaatcctcaaagactaacccgttcgaaacgcactttatttaacttctgtaattgtgacgtgcatgtcgccgcctggtgtttgcacagctactttatcaccaacgtgtttgccaagtaatgcttgggcaattggtgaatcatttgaaattttaccactgaatgggtctgattctgcagcaccaacgatttggtaagtttcttcttcaccatcttcgtcgtctgtaaagctaactgttttaccaacagcaatttcatcagctgcgatgctatcaacatcgattacttctgcaaagcgtaacatattctcaacttctgcgatgcgtgtttccaatgagctttgttcatctttagctgattcatattcagagttttctgataaatcaccaaagctccgtgcaattttaatccggtcaatgacttctggtcgttttaccattttgagtgtttctagttcttcggctaacttttctttgccttctgcagtcattggataagttttttgtaccattttatccacctctttattttaattaataatactgactatcttaattactgtgtacgtccttgtcaaatctcaatctttaatcggcatttaggattgattgaatctttgttacaagtaaatcaatggccacgcgattattgccaccttctgggacaattaaatcagcgtaacgcttggttggttcaatgaattcatggaacatgggttttaccgtcttaagatattggccaaccacatcatcaaacgttcgaccacggctttccatatcgcgatgcatccgtcttaataaccgaatatcatcatcagtatccacataaaccttaatatccatcaaatcccgtaaccgggcatcagccaatacaagaatcccctccaagataataacatcttgcggttcaacccgttgaatttcctccgtccgattatgaattttataatcatagaccggttgttcaatggcttgatgattttttaacattaatgcttgttcgattaataaatcgttgtcaaaagcgtctggatgatcataattcgtttgttggcgttgttcaaacggaacatcttgccgtttgtaatacgcatcttgtggtaataacatcactgagtgattcgcaaatttttgggcgatagcctggctaacggttgttttcccgctaccggacccgcctgtaacgccgataatgatgggtgcttttttttgactggacatgggacgctccttttattctcaacttctttttgggcaaacagaagtcgacctccaatagcggtcgacttcgataatcctaaatgaacctaatcttcaatcgaatctgttgtatcgttatgttgttcgaaggttcttgagtaatatactttacctgtcttcaagttagcaacaaagtagagataattttgatcacgatcagctggattcaagacggctgtgacagactgtaaactaggtgagttaaacggtcctgggccataacctttattgatatataagttatatggtgaatcgactttagtatctttgttataaaggtgtgtcttgtgggtatttaatgcatacattactgaaatatcagattgaattggcatatcgatgtctaaacggttaaagaagacaccggcaatcttttggcgatcgacggctgtgaccccttcacgttcaaccaatgaagctagcgttaacgtttgttgaacggttaacttcttatccttaatggttgcataataaggttgcatcttttgatccatcgttgaaaccatttcggtgataatttcttttaatgtactatctttataaacttcgtaagtggctgggaaaaggtacccttctaagtgatagcggacatccttttgagccattgttgatgacaataatgcagggtatttcttctctaaacttgctaagaattgcttatcattcgcttgtttgatgaaggctgctttagagaattttgtttgtttaccaacttcggccgcaatttcttctaaagtgaccccttctttaactaacaatttgcccttcacatcgcgaggacgggttggtgtgccttctttttgtaagttagagatgatcttatctaaccccattgattgtttcaacacatgataaccggcttggaaatccgagaaattatgagtcttcacataataattaaagactggcgcgcttcgaattaattttttatcctgcaaaatagcagcgatttgtttattcgttgagccgttgggaatgcgcacggtaatttcttgttttgctttggtgtcgtatggtttaagagatgcttgtacgtagcgatatcccatgaatccaataatgacaacaagcgctaacagaataccgataatccaatagacaattttatttgctgcttttttttctgcacggcgttcttcgtacaatgattgtgccgctttttcttgatttactggctccttttgatcaactttcttcaaaggatgacctcctaattgctcttttaaatacaatccttaaaacattataccaaattattcaaaaattgcattaaagattcgagattaacggattttggcatcaaaagtagcaactaattcagcgactactttttcaaaagcagcgttaacttcttcttctgttaaagtagctgcctcattgaggtacgttaaggtgtaagccattgacttctcaccagcctcaatatgactccctgcgtaaacatcgaaaagttcaactgaaactaagtgggcgccaccctttgctttgatggcttcaacaattgcggcatttgaaacttgatcagacacctgaattgcaatatcccgcgttacttcagggaatttaggtgctggtttagcaatcactgtttgggttggcaaggctaggatttgtgctaaatctaattggaaaacataagtttcttttaaatgattagctttcgcaactgctggatgaatttgaccaacaaatccaaccagttgttcaccaacgtaaatggctgccgttcggccaggatgcatttctggataagcttgtgttggttgataactgattgcatccgctaagttgtaacttgccatcaacatttcaaccacacctttgattgtgtagaaatcaactggtgctgcggcagcttgccaagtcttcatttggcgattgccactcattaagccagccacatattcaatttctgttggccgaacttggtcgtctgcttgttttaaaaatacccgtccttgttcgtatagtgcaagatcagtttgtttacgtgccacattgtaagcagcatcgtccaataaaccagtaatcaagttcatgcgtaagtgcgcatgatcttgcgtcattggccaatcaagtgctgtcagcgccgaatcaacaagcgtaaattgacgcgctttttcaggggtcgttaatgcataactaattgcttgcgttaaaccagcaccttcaagtgtatgccgggttttacggagtgccttttgttcagtcgttaatgccccggttgtcatatcgccagttggcaatgtgcttggtaagttatcgtaaccgtataaacgagcgacttcttcaatgatatccgcttggatttcaatatcccaacgccgtggtggaatggttactgttaaatgattatcagtattgaccacactaaaaccaaatcgttctaataattcaacaattgtttgcgttgcaatctctgtgcctaagacgcgattaatccggtcagcttcgatttcaatcactttgtcagttggcactaagttagttgggctaaccgtaccagcagtcacttgcccattaccaaggtctgccatcatcatagcagcagcatctaaggctgtttgaacatcagcaacattcacgcctttttcaaaccgtgatgacgcatctgaacgcaagttatggcgttgagccgttttacgaactgcagttggtgcaaaaactgcggcttcgataatcacatttttcgtatcagcagtaatttgtgagttcaaaccacccatgacccctgctagcgcaattggtcgatgaccatctgtaatgacgatatcttcatttgttaagtcatgtttgccttcatcaagggtcgttaatttttcgcccgtcttggctaaacgaacttcgatttgtttgtgatcacccgttagagcatccgcatcaaacgcgtgtaaaggttgcccatacgttaacatcatgtagttcgtcacatcaacaaggttattaatggggcgaatgccagcattccataaacgcgtctgtagccacattggacttggttggacggtcacgttttgcaacatacgcaagtgataacttggtgctaattgttcatcagcaacttgagcagtcaattgatcagctgtttgaacgttgctttcagtcactacgatatcttcaaaatgaggtgtcaatgattcaatggcggccacttcatgggccacaccgtggatgccaagcgtatcggctcggttagcggtgaggtcaagatcgataatgtaatcagtcatcccaagagcttcataaacttctgtcccaggttcaattgcttctgggaagacaaagatgccatcaacatattccttaggcacaacgctatcggcaaagccaatttcttgtaagccacaaatcatccccattgaaaccacgccgcgcatcttgccttttttaatcttaacgttgtcagcaatccgagaattaggtaatgcaacgactacatattggccagccgcgacattgggtgcaccacaaacaatttggaagggttcatcttcaccaacatccacttggcaaacattcaagtgatcagaatccggatggggttcacaacttaaaatatgtcccaccacaatttttttcaagcccgcgctcttttgcgcgacatcagccacttcaatccctgttcgggtaattttttcagccaatgcctctggggcagttgttaaatctaaataatcttttaaccagttgtaagaaactttcatggtctagccctcctgtgtgaattgatttaagaatcgaacgtcatttaagtagaagttccggatatcatccacaccatatttcaacattgcaaagcgatcaaccccgagcccaaaggcgaatccaccatagacatctgagtcgacaccgccggcttttaagacgttcggatgtgtcatcccagcccctaaaacttcaatccagccagtttgcttgcagacattacagcctttaccatcacaacggaaacaagaaatatccacttcaacagatggttccgtgaatggaaagtaacttggccggaaacgtaaatcacggtcttcaccaaaaatatggtgaatcgtgtattctaaggttccctttaagtctgccattgtaatgtttttatcaatcacttggccttccatttgatagaattgatgcgaatgcgttgcatcatctgtatcacggcggtaaacacggccgggactaatcatcttaatgggaccattagcaaagtcatggttttccaagtcacgtgcttcattgggtgacatgtgcgtgcgcatcaataaatcattagtaatatagaacgtatcttgcatatcacgggctggatgattagctggcatgtttaacatttcaaagttatgtttttcatcttccacttcatagccagcaacgacttgataacccattccgataaataaatcttctaaatcatcaatcacttgagttaagacatgcggggtcccttttttgaccggttggccaggtaatgtaacatctaatgtttcgtgagccagttgggctgctgccttcttggcttctaattctgccttccgggtttcgattgcttctgccaaatcactcttgatttcattagcaaatgcccccaccttaggtcgttcttcattacttaaatcacgcatgccgcgtaaaacttctgtaatcggtccttttttaccgagcacttccactcgaatttgatttaacgcctctaaatcaacaactctttgaatttcttgcagactcttttgctgtaagttttctaattgttccttcaatgacattgcaattcctccttatttttttcaacaaaaaaagcccgtccctcaaaaagggacgaagcttcgcggtaccaccctagtttacgaccattccagtcatacactcaagtttgcgctaacgggcaataccggaccaatggtcaactcagaaagtgaacttcacctaaacttagttgaataacttgcagtcaactgattattctccctgaaaactaatgattaggttactctttttcgtctttgtttaataattgtattttaacgtaaataaccgcaattagcaactaggcttctgtcgcataccagtcgtttgaccaatcgtgaatagcagccattactggcgctaattcttcacctttagtggtcaatcgatattcaatcaacgcagaatcatcactggtaatccgcgcaacaatgccttcttgttctagttccttcaatcgttcaaccaatacgcgatcactgcacttaggcacactgtgcactaagtttttaaaccgttgtgccccgttttctaataggacatcgataatcaggccgttccacttcttacctagaattgaaaaagtcttttcaaatttaggacacagttggaaggcctcttgacagtcagcatttgcgttttcttttacaatcaccattattttcacctcacacttattaataagaagtgtactgaaaaaggctgcaaaaagcaacctatcagcttgaagcatctttacttgttaattgccggtgtttggcggagaactttttgtttaaatttcgtccacattggtgtacaaaattccgtcacagcacaataatcatcgactatcgatacaatgtaactttccttatatttcggacgactaacagttgcgccccacatgtgtttaacgatgatgtctttttctttaggtgagagttctgttaatttttcggcattccgaagcgcaatgcgcggatggatataagcatgtgtgcctaaatcgaacttcgtatcacgccagtcataatagaataaatcatgtaataagcccgcgcgtgcaattgctcgcgtatcaagatgccacttcttggcaagttcataactgcgataagagacgcttagcgaatgttccaaacgatctgaatgatgatgttgcgtatagttcgctaatttttggacttcatctttagctaataaatcggcaattagagccatgtaatccgcgtcatcgtaccattttgctgttgaattcattcaaagactcctgacattttttaaattcaaattctgccacaaggataacagcttttcgttcaaaaaagaagttaaacgccttaaaaagttacgtttgttagaaaaaattaagaattaagcttcaatcaacttgaacattaaaatcccagctgcgactgccacgtttaatgattcagcattccctggaattgggatgtaaatattttgcgttgtggctgctaagacgttttcattcacgccgttcccttcattacctagaatcaaggccatgtcatttgctttaggcacatcttgataactgatggcctctggatttaattccgttccataaactgggacgtcttgcgaattgaatttcttcatccagtccatcaagttaccttgataaattggtaaatggaagtgactgccttgcattgaccgcaagagttttggattatacaagtcaacactgccattacctaaaacaacgccggcaaagtctgctgcgtcggctgtccgaatcattgtgccgatattaccaggatcttgaacagcatctaataataagtaacgacccgttaatttttctggcaccggtgtttcagacatttcaacaacggcaaaaatgccttggggtgctttagtttcactcaagtgttgcgccacttctggtgcaatttcaaaagtttcatcgtaaagaccgcgcaatgcgcgttcgtccacatatttttcagtggcgaaaacttggcggatgacggccttattttggattgcttcttggactaaatgccagccctctagtagatacgtattttctttacgttggtttttcttaacggttaatttcttagccgccttaattttagtgttttgattcgattgaatgtattccatgttgtgctccagtctatttagtactttctattatacgcgacttagtgggtaaattctatcaagggtcgctttttaatcgccaaatcgggttgaacagcttacaatgaagaggaggtgatgacaatgcaaaatgcaattcaacttgaagtctatggccgcgtgcaaggcgtcggatttcgctggatgaccaaattggtcgccgataaactccatatcacaggtaccgttgccaatcgtgaagacggctccgttaaaattattgcgatgggcccagcagacgcactcgaaaaatttatcggtgctgtcaaagcttctcccacccctagtgggcgcgtcgaccgtgtcattcaaacaccgctcgaaaatgtgtcagcgtgtcataaattttcggttgtcagttgaaaaacctagccccttcaagtatagttacacttgttgaaacttatcttgaaagggctaaatttatgaaaaattctaaacgcttcgcgacactcgcgatgcttacaatgaccgttacattctttctcgctggctgtgttccacaaaaaatgagcagccatcccaaagtcccaaccggcttaatctatggttcatcctataaatacatcgccgtgccgctccaacatattatggaacgcattgctgatgttttcggtggcatcaatggttacggctgggcaattatcatcatcacattcgttgtgcggatgattttactcccattaatgttgaaccaatcgaataagatgacggcccaacaagaaaagacccgtcgcttgaaaccgcaattagatattatccaagaacaacaaaaagcggcaacaacccctgaagaaaaggctgaacttagccagttgatgatgaaggtttataaggaaaatgattcaagcatgatgccaagtcttggttgtttaaccttattaattcaattaccaatcttctctggtttgtatcaagccatccaatactcacctgaaatttcaagtagccacttctttgggatcggtcttgggagcccaaacattatcattactgtgattgcgaccctcttatatgtcggtcaaagtgcactttcattagtcgggatgcctgctgaacaaaagaaacaaatgcaaacaaccgtcctaatgagtcctgcgattacattcttcatttcgttatttgcaccagccggtttagcactttatttcttagccggtgggattatcatggtgattcaacaattaatcacgacattcatcatcatgcctcgtgttaaaaaacggatcgatcaagaaattaaggaaaaaccaatcgtcacggttgtcacaaaagaaatgttcactcaaaaagcagcagtcaaaccagctgccgacgtcacagaaacaccaacagaaacaagcaacccaactgtcgctacacctaaagtagctggcaaacgcaactcaggtaagcaacggcataagccacaagcttaaccaacaaaaaaaagcggtgcgcctcaatcaattagatgattgaagcgcaccgcttttttaatccgtattaactggttcttctgattttggttctacttcacgaatcagtggtaactcaactctaaaaacagaaccgtagccaacgctactttctagcgacacattcccgtcatagccttcaacgagttgttgggcaattgctaatcccaatccattgccacctttttcccgactccgtgctttgtcaacgcgatagaaccggtgaaagactttcttcttatcttcttccgaaataccttcaccaaagtcttgcacggccacttgcgcataccgctcatcactagcgacggcaatatgaacttctttacgtatcgttgaatatttaatcgcattatccaacagaataatcataatttgttctaagtgatttcgattaacatgcactagcgctggttggtgcaaatcattgtcgagcataaaattaaattctggatataacatctcgaagttatggtaattctgaagaacaacttccccgacatcggtcacttcagtcgttccttcagtcacgactttatctgcccgtgttaaatcaagcatttcttgaattaaatttttcatccgcaagatttcttgtaacgaagccgctaaagattcttccagtatctctggatcatctttcccccatcgattgagcagttgtagatgcccttcaataatcgcaactggtgtccgcaactcatgcgaaacatcactgacgaactggtcttgctgttcgaaataatgctgaattcgattcaacataccattaaacgcactgaccagatcagataattcatcttgactatgcccagtctcaggaattcggacatctgaattaggctctgaattaatggcttctatcgtttttttcataacttcgattggtcgcaagaattggttggctaataaatagccaatcaatgcactaaataacatagcaaaaaagacaaccacaactaacacaattcttaattcagtcatagcgtggttataatcacggacgttattgaccacctctacataaccaattacacggttttgacttgtcttaatcggactaatgccaatcagccgcatcttaccaaaaatagctttgcgctttaatgtatccgtatcgccttttggaaacggaccaatcgccccgcgcgatgcaaacaaacccttcttgtttgcatcataaatcttaactgtaacatcctgttgtgctaaccgcgttaaaaccgcatcttgatagatggctttagggctgtgacggttcggatccaattgattggtgacaaaaccttctgtaagatgtggcccattgctggacaatctcgcttgtacgacggtcaccgtatcgtgcacattatcgacttctctgtgtagcaagatattagagatactactaaagatcacaattgaaaaaatcgcaaaggtgataaaaatggccaacccaaccgcagctgcccatttcacctttaacgatattttacgacccttatttgttgttgatgctaccgtttcgtcctgcatcacgagcgcatcacataacccattccacgaaccgtttgaatgtaactttgttcgccagaacgatcaattttatttcgtaagtaacggatataaacatcgacaacattggtttcaacatccgaatcgtaaccccaaactttgctgagtaagacatcgcgtgccaaaacaacgttgacgttttccatcaatgttaataataattcatattcacgtttcgttagttcaatcacatcatcaccacgccgaacaactcggttttctttttcaaccgttaaatcacggtaagtaaccgtcgtttgtttagcagcgttatgttcgccttcgatatcaattcgccgtagcaatgcccgtaaacgcgctaataattcttcaatggcaaaaggcttaacgatataatcgtctgcgccatgatctaacccagaaacacggtcaatcactgaatcacgagccgtcatcataatgattggcgtattcttaacttggcggacccgacggcagacttctaacccgtttaattcaggtaacatcaagtctaataaaatcgcgtcccattcttcattcaaggcagcttctaaaccagtacgcccattgaaatggacctctgtctcataaccctcatgctttaattcaagttccacaaatcgagctaaatttttctcatcttcaataatcaatatgcgactcatttagtcactccccaaaaaagaatttttaatggactctctaaattctaatcaatgataagaattctctaagaaacctcaagcgccaaaatcggcttacctttccattttagcatagttccaattaaataactaactaatctgactctcatctgatggcgatttagtaataatcgaaaaaacacctgcgccttaataatcggctcgggtgtttagagaaacgtgcttcctcgaactgtcttttccggttaaccgtaaaatgatgcttatggctaagaaccgccataagcatcatttttctgttaatccttaaagccaaaaacgttcgactcatcactctattttaaaacgcacatcccgtcgcagccatttccgcttaatctaaaattgccattaatcctaaaaccgggattaatggcaattttttattaatgctcaatgactaaatgcaatagtcagcactcttgtactaaaacgtgctccagtagacatccgcttccggttagttacataccgcaaacgatcggtttcaccgctcatttacgatattccactaatcctcagcgcatccccgtctacttgcgcactctattgttctttataccaagtataatggaatgtgccttcgcggtctgttctttggtatgtgtgcgccccaaagtagtcgcgttgtgcttggattaagtttgctggtaatacttctgaacgatatgaatcaaaatatgtgatagcagctgagaaaccaggtgctggcacaccttgttggatggccattgcagctacgtcacgaacagcgccttgataattctttgtaatatctaagaagtaatcatccaacaataagttgtttaaatcagcttttttatcaaaggcatccgtaatcttttgtaagaaacgggcccgaatgatacagccttcacgccagatcttagcgatttcgccatagtttaatgaccagtcatattgatctgaagcaacccgcatttgttcaaagccttgcgcatagctcatgatcttgctgaagtacaatgcttggcgaatcttttcgattaattcttttttatcttctgttaatttagcaacggttggggctggtaaaatcttgcttgcagccacccgttcgtctttcattgctgaaatataacgtgcataaacagattctgtaatcaatgattgtggcacacccaattcaagggcgctttgtgaactccacttaccagttcctttgttaccagcagcatctaagatgacgtcgacaattggtttatccgtttctaaatcatcttttcgcgttaagatgtctgctgtgatttccattaaataactgtctaattcgccgtggttccattctttgaagacatcagcgatttcttcaacagataaaccaacaacgtttctcaataaattataactttctgagatgagttccatatcaccatattcgatcccgttgtggaccatcttaacatagtgaccagcaccgtttggcccgatgtatgtgacacatggttggccatcttcagcctttgctgacatttgttctaagattggtgcaactaattcataagcttctttttgaccgcctggcatcattgaagggccttctaatgcgcctaattcaccaccagaaacacccattccgataaagttaatgcctgacttatctagttcagcattccgacgaattgtatcgccaaagaaggtgttcccgccatcgattaaaatatcacctttatctaataaaggtaacaattcgttgatgacagcatctgtaccagcgccggctttaaccattaagatgattcgccgtggtttttctaatgattgaacaaattcttcaattatatagcttggtaccaatttcttttcgctgtgatcttgcatcactgcttctgtcttagcacctgttcggttataaatcgcaacggtgtaaccgcgactttcaatgtttaatgctaagttcttgcccataactgccatcccgatgacaccgatttgtggttgactcatgtaaaaggcctcctaaatgatttctaaatttaagcgttgttgactatcaaaacgacaacgcgtctactgtgtttatgttagcagaattacgctttaaataaaagcattttaactgatttggtccggtccatttaacaaattgggtataaaaaaacgccaaacttagtcggcgtcattgttttgttcttctaataattgtttaagcttagcaaattcaggattgggtgccgtttcttcttcagcctgttgcttagcataggcttcttcagaaatgactgaccacgactgtccggctggcatcacatcatcttgttcttcttctggtgttaggatgtgacttggaatgtgcaagagaatgtgatcttcaacagctacctgtagctctagggcttcgccttcgattgggaacaaaatatcttcgtccgtaaatcgtcccaactgctcgtcttctggatcaacgtagatttcagtgaattcaaaatccattggcaaggctactggatctaaactccgcgttgaaggcactgttaatgtcccgaccacatgtacgcgtgcaattacagcgcgctggtcaaccgttaattcaccgtctactacaaatggtgtagcatctaggacatcagcttctcttttttgtaaactttcttttaacatcaatgtttctttaaacatcaatggatgatcacgatgttttaataatgattggactgtccattttaacaatgctcgtcatcctttctttggttaaaaatcggttggcgggcaaaattctgtgattgccagccaaactgttcttgtaatcgatcaactcgcacctctaaccccagtgggccctcttcggcacccaatttagctgagaccttactgataagtgggtgatcgagcgtttttttcaacgtgtgcaaatgcgcctggccgacttggttaaagccaagcaaatggatgggccgctgcgctaatgattgttcaatatccgtttgttgaatattcaacagaacgtataaacaaacccgttgcaagcgtgcatacgtatatcgctttgttttaagtgcctgtaacaactcggcataccgattgactgaatgaatcacctttttgaaacggtactccaagccctctgacatctgataaatctgccgaagttgggcaaggggtgtactttcaattcggtatttcaatagcggccatagttggtcccaatccagatgcgattgagtctggagcgctgttaaagtcgaatgcggcatcactggggctaactgtgcccagtcatcaccctttgttgccgcctgtcggatagcactggcactagcaaattgtcccgcgccaatcgtttgatcgccgtgttgtgcctgctcacgcttaatcgcaagcaactgcattggcacttcaagttgcgcgttggcaaccgcataactgacccctaagaggtgattgggttgatctaaatttaaatttaattctgcttgataaaactcattgagctgcgtcgcataagttttttgataatcaataaacgtctgtgacttggcctttaaagctaaaatctgttgcccgacttgctgatagtcaaacgttggatattcactgccaaacgctaaggtctgacaaccaagcgccgccaataacttgacggccccatcagcaaaacggtctgcaggttggacagcactggcaaacggcaattcaacgaccatatcagcaccattgctcaaagcaagttgtgcgcgcgtccatttgtccaaaatcgcgggttcacctctttgcacatagttaccgctcatgcagacaatcactaaatctgcgtgcgaagctgcccgcgcctgttgcaattgataccgatgtccattatgtagcggattatattccgcaataatccccgtaattctcatgcgtcctccgcctatttcactgcgctaaagaaccaacgcacactatcttcttgaacggcttcttggccaaaatcagcactgactgatacattcttgaacccagcagcttctaatgctgcaacataatctaccaccggataagttcgttcatggtgtaattcattaagttcttgataaccgtcaatctcgtcatcccagataaaaaagctgagatcatgttcaactgaatgtggtacttcacctgcgtaactcgtccacatgaaggccgtttctgccgtcttatcgttatacataaaacctgggaaaagctcatccatttgataaagtgaatgggcatcaaatagaaattgaccacctggctctaaagttcgataaacttgttcaaaaacttgttggacatgcgctaaatctggcatgtaacagatcgagtcgtcaaaacaagtgaccgcttcaaacgtcccaatttcgcctaagtcaagcatgtcgccttgtaataaaggtaactcgacctcggcttcagaagccttttcagaagcgatactcaacatctcggccgataaatctaagccgacaacctctagccctgcttgttttagcaagatggctaaatcaccagccccacaagctagttctaggactcgatgtttattttgtaacgtctgcaacgtgtaatcccgccattgaccatataatgaatggtccatcaaacggtcatagacggttgcaaagctttggtaaatcattcttcatccaaccattcggaaacatcaacaagtggtgcttgatcccaaagtttttcaaggttgtataaggcacgttcttctggcatgaaggcattgacaacgatatcgccaaagtccatcaagatccaacgtgaaccctttttaccttcgatgtgttttacgaaaacgccattttcttcttctgcgtcttcaatggcgtcaataattgcgcctaattgacgttctgacgtcccagttaacatcacgaagtaatcagctaataaactgatgccttccatgttcattgcgacgatgtcttctgctcgtttgctatcagctgcttgcacagcaatttttaaaatatctaaacttttcactaaagttctcctttatttggcttgagtcggtacccaagcattgtatgtgtcgattgttttcggataaatctgcttcttgccctgaattaaaaaggtcaatgtatttaagatttcataccgcacgccggctgctaaatcagccattgctgtctcacgagcagcttctgcgcccggaaaattgcgcccaggttcgacaaaatccgccacaaataaaatctgatcaatcaaggtcatttctggcgcaccaatcgtatgacgacgcacagcatttaaaatcgtttcatcatggatttctaaatcacgttcaatgaaataagcaccaacaacaccgtgccagatggcattaccgtaattgagtagttctggatcaaagccttgcgttttaatcgcttcaatgaacgtttcatctggtaattgcttagtatagtcatgcactaaaccagcaattgccgcgcgttcaacatctgcgccatttttttgtgctaattgaatcgcggtggcttccacacgcaaacaatgttcaaatcggctttcagataagttagcggcaactttagccactaactcagcccgtgtatacggcacgatgttttcttgataaacaaaatcactcatgatagaggccctctttttgaatgtattcaaagactgggtccggtaacaagtaccgcactgaacagccttgttgaatcttattgcgaatttgcgttgaactgacatcaattaccggtgcgtccacccataagactggatacggcgtttgttgagcataccctgttcgtttaacaccaacaaattggactaactgcactaaatcatcaattcgataccaagtaggcaagtagtcgaccatatcaccgccaatgatgaaataataatcgatttcagggtgttgttgttttaatgccacgatcgtatcgtaggtgtaactgacaccgccacgttcaatctccgttaaatcgagttcaaaatgcgaattgtcagcgatggcacgttctaccattgcaacacggtgttttgctggtaatgtttttttctcatcaacgtgcggtggattggcatctggcataaacaaaattttatcgagaccgagttggctacgaacttgttctgccatcactaaatgaccgatgtgtggcgggttaaatgtgccccccataatgccgacttgcaagcgatggccatcttctacaaccaacacgtccggttcagtcacatgatttgtctgctttagcgttgcactttgcatctgatcaccgccttattagcgtccgagcttagtaacaatcgttgaaatcttttggtatttttctttccgtgaagctttataaatcaccaatgtgcgtccaattttttgcgcaatttcgatgcgactgtcatgttgttttaagaagttggctaattcatcaacggtcacttctgttgtttgtaacaagttaatcttaacgagttctcgtttttcgatggcctcttcaatttgttcgaaataagtttggcttaagccgtttttgcctagttgaaaaagtggtttagtggtttgcgctaaaccgcgtaagtaatgtttttgtttgcctgttaacacgtgcgatacttccttccctaattaaattaatgctttccgaatcatgactgagacacctttaggcgcatatcccgcaaccacgacattttctggtaacgtaatccagcctaacccagcaaacactaaatcactcttttgctttgttgagaattcataccgttggagttctggaaaatcagctaaatcttctggatgtggtggctgtagcatgtcccctaattgcttagcgtagaattgatctgcattttcaagtttagtccggtgaatgtaaagttcgttgtcaaaataaccgacaaagccatgccgtgcaccttgaatgaaatcaaaacgagctaacccacccaagaacaatgtttgttgttcatttaattggtatacttttggtttaatccgcttttgcggcgcaatcaaccgtaagtctttatcatgtaaataatgcgccatttgttgggcatgcataatccctggtgtatcaatcaatgcatgatcatcttcatacaatggaatatcgatgcgatctaaagtcgttcctgggaattgtgacgtcgtaatcacgtcgctatctaaaatcccagtttgcttgataatgcggttaatcaacgttgatttaccaacgttcgtcaccccaacaacatagacatcgcggcctttacgttcgcgttcaatcacggccaataattcatcaactgaattcccttttttagcactgaccaacatcgtttcaaccggatgtaagccatgttctttcgcttctttttgaatccaattgatcactttatttgggttaagagcagatggtaagatatcaaccttattccccactaaaatcacggggttatcgccgataaaacgatgtaaccctggaattaaactcccgttaaaatcgaagatatcgacgacgttcacgatcaacgcgtcactgtcgccaatttggttcaataaggctaagaaatcatcatcatttaatttgatatcactgatttcgttgtagtgtcgtaatctaaaacaacgttggcaatacaattgacccgtttccaagccttttttaagcgctgaattaggcgtatagccgagtgcttctttgtccgttgtttggatgcgagcgccacagccaatacaaaatagttcttccacagtttgttgtgtttcagtcatttaaatcctcccgccaagttaaatctgcgtgtttttttagtagttgttgcataatatatttttcaaagaatcgattaatcgatgtattccaggcatcactgtcaataatgggtttgaccaatatcgtccggacgccagccacattaccggcatgcatatcggtaatcaattgatcgccgaccatcaccacttcatgtcgcgaaaggccaagctgcttcttcgctttggtaatcccagttgccaatggcttgttcgcccgagcaatgaatggtaattgcaattcactgagcgcgcgttgcacgcgatcatggttgttatttgaaacaaccatcacggtgatttcggcagcttgcatctgtgctaaccaagcttttaactgtggtgtgccatcggggttattccacgcaattaacgtattatctaaatccgttaaaacggccttaatcccttttgccttaagttgttctggtgttaagtcgtagatggcattgaccatccaagttggcttgaaattctttagcatgtactgtcccctcgactttaatgtgctttcatcaacagcttcttgcgctttgctacacttatcaaatcggcgcttgcagcgccaattcgctaagttaggcaaatgctcggaagctaaccgtggatgacgcacttcttttctttaacgtgcttttcaaaccatattcctgtgcctagcgacacaagtcaaacgattgcttgcagcaaccattcgccttgttaggctagtgctcggagtataccaggtttgaacgcacttcttttctaacgtgcctcagtaggcatatttctgcggctagcgacgtccgtcaaacgaccaacaagttggtcattcgccagactaggctagtcctcgaaatataaccgcctactgacgcacttctttttaatctagtcactgattaattatagggtatttgacaccaaattgcacctttacgcggttaatttccataatttccaactaattcctaatccatttaaatccataagtcaaactaatcgacttttagccccaactctggtacgtttaaagaaattgagaggatgtgtttgttatggaaaaattcggttttaatcactttggcggccctgacgttttcgaacgtttcgatcagcctcaaccaactccaaaggacaaccaagtcctcattaaagtgctcgctgctggattgaatccatacgatgttgcactacggaatggttcacaagattcagtgcgcccattacccttcccaatctttcctggtacagatgtggttggtgaaatcgttgaacttggtgctgacgtcgatgattaccgcgttggcgaaatcgtcatcaatcaccgatcaatgggtgcttatagcgaatacgtaacggctagtactgcgaagattctccgtaagccagccagcatgagtatcgctgaagcagccggtttacccagtgccggcatcactgcttacaatacgctgatgcacttcacaaactttaaacacggcgatacaatcgctattatgggtgccagtggtgccgttggtagtttactcgttcaattaagcttagcagctcatttaaacgtgattgcaattgccaatagtgctaacctagactatctgcgctcattcggtgtccaagaagtaattgcttatgatcagccatctgacttcgaacgacttgcgcagaccgctaaaatcggtatcaacttaagtcgcgatccagaatcaactgaacgcctcaataacttagttgcaccaggtggcacattcacttcaacgaccatcttaccaacagacgatcaacaacgcgctgacatcaattaccaatctgtctatccgcgtaaggattatgcagatttaaccgccttacaagatttaaatgaattgatcgatcaaggtttactacacaataccgtcttcaagacgctcccatttactttggaaggcattattgaaggtcacaagctccttgagagtcatcatgccccaggtaagattgttattagccactaattttataatgataaaagaaagagtctagaacaaaacgaagttttgtcccagactctttttttgatctttaattatttgtttaatgcagctttagcagcttcaacaactgatgtaaatgcagcagcatcgttaacagctaagtcagctaacatcttacggttcatgtcgatttcagcgactcttaaaccgtgcattaattggctgtatgagatgttgttcatacgagcagcagcattgatacgagcaatccataacttacggaagtcacgtttacgttgacgacgatcacggaatgcataacggtatgaaaccattacttgagtatttgctgatttgaataataaatgtttagcgccgcgataacccttggctaattttaaaatctttttacgacgtttgcgcgtcactgttccacctttaacacgtggcataagaatttcctccttgaataacaaacaacgtcaaagcgttgctgtactgatctaatttttgcttgaatccgaaaatgctatggcttatttaaggcctgataacatttgacggatacgtctcatatcgctatttgaaaccattccagattttcttaattgacgacgttgtttcttagtcttgccgtggaaacggtgacttgtgtaggcgtggctgcgttttaggccgccattacctgtacgtttaaaacgttttgctgaagcacggtgtgtcttaaattttggcatgatatttcctcctaataaatcagaaacagattttttatttttggtcctttagcggttctaacattaagaacatgctacggccatccattttaggacgtgctgtaactttagcgatgtcctctgtttctttagcaagtctttccaatacacgttgcccaatttctttatgcgtaattgcgcgccccttgaaacgaatagaagctttcactttatcgcctttgccaaggaacttacgtgcattgttcaacttagtattaaaatcattttgttcaattgtgggactaagacgaacctctttgaggttaatggttttctgcttcttacgagcgtcacgttgtttcttttgaagctcgaaacggtacttaccatagtccataatacgagcaacgggtggttttgcgtttggtgaaaccaaaacaacatccatattagcttgatcagctaatgcaattgcatcttgagtactcttaataccaagttgttcgccatcttgagcaatcaaacgcaattctcgtgcacgaataccatcgttaaccatcaaatcttttgctatgactcttcacctccataaagtttagagagaaaatgcagctaagtaataaaaaaagcggccctctcataacagaaaggcccgcttgttcggttacttagttcgtccgaattagaaactatcagcccagagacatcaagtgtctactaaggcgagaagcgggaacttctgctttatttctcaacgaaaataagtatactcggttaggaatttaaagtcaaggaaatcccgcatttaaatttacgtgtacttagttgccgtaatgattatccactaagtgcgtggcttttacttcgtcaatgttgtgtgtaccagctaattgcatgactaattctaattctttttgcaagtagttaaagacactttgtaccccttgtgcaccgccaagtgctaatccgtaaatgactgggcgcccgattgcaacgatgtctgccccttcagccaatgctttaaagacgtgttgaccacgacgcacaccactatcaaagacgattggtacccgtttattaactgccttagcaacgacgtgtaatgaatcaaaggctgcagggccaccgtctaattgacgaccaccgtggttggatacccaaattcctttagcaccggcttgaagtgcaatttcaacgtcttctgctgtttgaatccctttaacaaagactggtaaatgtgtgtattcagaaatgaattcaacatctttagggttcaaacgttgtttagctgatttgtagacggcatccattgtttggcccacacctgtttggtaagcttcaacgattggtaacccgactgggaatgtaaaatgattgcgtttatcggtttcgcggttaccaccaactgtggcatcagctgttaagacaatcgctttaacgttatgcgccatcgcttcatctaaaatcttacgattgatatcgttgtccttactcatatagagttggaaccattgcggtgcgccatctgctgcggttgccatatcatcgatacttgctgacgcaaatgaactcatggttaagattgaaccgtaatcagccacacctttagcggttgccgcttcccctttagtattcactaacttatgagctgcaacaggtgccataatgattggtgatgttaagtgatcgccaaagatttcggtagttgtatctggattttcgatatcttgtaaaacccgtggtgcgatgtatttgtgattaaatgccgtaatattttcgttaatggtataaagatcacccgcgccactgtaaatatacccaaagccacccttgggaacaacttcgccggcttctttttccaagtcatagaggttaataatgtccaatggttgctctgctgaacctgcttgatatttttctgtcgtcataataacgcctcccattaatcaacgattggaatcgtttacatatttattataccgcttttttagttgtgcgcaattaaaaaaacaaaaaaacgtccgaaatgtcaaaataacatttcggacgttttaataaccgcttataggttgattgttttgtgatctttaccatcgcgactgtagttaccaacttcagcaacgattgcatctacaaacatatctgaggcttcttcagcagcgttttcttcaccgtatttacggacagaaaccgttgcgtcagcaacttcttgatccccaacaactaatgtataaggaatcttgcttgtttgggcttcacgaatcttataacccatcttttcattacgatcatcaatgcgcacacgtaaaccatgtttaatcatcgcatctttgacgttctttgcataatcataatgtaattcattcttaacgggaataatcacagcttgagttggtgctaaccatgttgggaaagcgcccttgtagatttctgttaagtaagctgtgaaacgttccatcgttgatactaaaccacggtgaatcataactggacggtgcatttcgccatcttcgccaacatattgtaattcaaaccgttctggtaacatgaagtctaattggattgttgaaagtgtttcttcattgcccatagctgtcttcgtttgaacatccaacttaggaccgtagaaagcagcttcgccttcagcttcaacgtaatctaaaccaagatcatccatagcaccttttaacatcgtttgtgctttgttccacatttcatcatcagcatagtacttttcggtattagcaggatcgcggtagctcaaacggaatgtataatcgttgatattgaagtctgagtacacttcaatcattaatttcaaaattgacttgaattcatcttgaatttggtcaggacgaacgaatgtatgtccatcatttaaagtcatttcacgcacccgttgtaaccctgaaagcgcacctgatttttcatagcggtgcatcatccctagttcagctaaccgaattggtaattcacgatatgaacgtgggtggtgtttgtaaacttggatatgtgatgggcagttcattgggcgtaattcaagcatttcgccatcgcccatatccattggtgggaacatgtcctcacggtagtgatcccagtgacctgattgtttgtacaaatctaagttcgctagaattggtgtgtaaacatgttcataaccattggcaacttctttatcaatgatgtaccgttcgattgaacgtcggatggtagcaccatttggcaaccaataaggcaagcccgcaccaaccttaggatcaacaaagaataagtctaattggttcccaatcacacggtgatcacgttctttagcttcttgacgacgctgtaagtcagcatctaagtcagcttgtttgttgtaagctgttccgtaaatccgttgtaacatcttattacttgatttaccttgccaataagcgccggcaaccgataagagttcaaagaccttaacgtcgctcactttagctagcattggtgctaacccaaaatcagcaaaatcgcctaatttgtaaactaagacttggtctgtttccatttcatctaataatgctaatttgtaagtttgcccggcaaatagtgttttagcagcagctttgtctaagctgacacgttcgattgccccgccagcttggattaacttgctcattgcttttttaatgtctggtaagtcggtcacagctacttgaccagcttcgttttcggtatcatagaagaagccatcttcagttgcatgtacttcgccgaattgcatctcgggataagcacggttcaacgttgcagctaaaacaaaggctgccgtattccaaattgccatcaaatcggttgctttgtcgtctttagtgatgatttcaattgccccatcttctaaaattggttgctgtaaatcaactaattcaccgttcaatttaccggcaattgcctttttagctaagcttgtactaattgatttagcaacatctaaaagacttgttgcttgttcaaatgccttttgggcaccatctggaaaagttaattgaatctctgccattactattcactccttctaatttgtcatcaacaataaaaaaagtccctgagacgcacgaattgtgcagctcagggacgaattaatttcgcggttccacccagattgagaccccaacatttggttctccaactttaagcgtctataacggaaacgacccgatcagttgtattgcctttgaaagtggtcaattaaatgggggtgaaaaactttcagctatgtttttctctctgcgatggttcatttaaaaggtgtctttcatcattgattgattctattaaaacacttaattgcttttttagcaagcctaaattactaaggttgtaagcggcgattttgaccaccaacttcaatttcttgcgctaaatagcgcacacgttgcatgatgcgggccgctttaaccggttcgtctccttggttgctagttgtcaaatgcgtctctaattcagtcattgtgaagtttgaactgaagaaggtggcgagttgttcttgcattcgatattgcaaaataatgccaagtacttcatcccgaacccacgcactcattgcatcagcaccgatatcatcaatcatcagaatcggtgctttttttatcacgttgaccttttctaacacattgttttgcccaattgcattcttcatctccactgcaaatgtcgggaaatgaatcaacgtggtttcaaacccggataacgccagttcgttggcaatcgcacctaacaagtaagtcttgccaaccccgaattgcccgctaaggtacaaggcttggtgaaaatcatggggtgcttgccgataagccccgataaacgcggtagctttgatcaatgcgtcaaaccgattggttggatcgtatgaatcaatcttggcctgttcaatatcgcgcggcatattaattgacttcactcgtgcatgcaaggcagcttgttcgcgctcttgtaataaacttaccgtaggctcataactgacatcgataaaatggttatttaagactaactttggcgcataacccggtgccaaagtggtttgcccattagctaacttcttcttttcgatgacgtattcgtaaattttagcggcactacgcgtgaccgtttcttgtgataagcggtctttgttagcttgtataaatgcttggacatcggaatcgttcaaggcatcttcgaccaatttattaaactgttggtttaacttttgccgattcatgtaatccgtcaaatctttacccatattttccattacgattcccgcccctcacgaatttttttcaacgccgcttctagttcatgctgatgctcaggtgtggttgtttcttttggcgcttgataatctggtttagcccatttaggtactggttcttttttagttttgttctgataacgcgtttggcgattgttttgcacctttgccgtctgtttggtttggaaatcgcgaatctgcaaaatcgcatccgctgccgtcttaaccccttgttgagcccactggttcgcaatccgatcgactagcgcctgagtgagcccatcatattgcgtaatgatataaacgaccaaaatattgagcacatcattgttaaagatatagcggttttgcaagtcctttaacgcccggatttcatttttagcgacaaagccgtggttcttttgtttcaagtattcgagataatcaactggcaagtagccctgactttctgttagccactgcaattcctgttcgttaaagccggctttttgccattctttttgtaactcggctaacggtttttgcgttgttgtagcagctggcgtttgccggttactctgacgtcgtgtgtaattgttcaagacgttctgttcgagcgctgccatattaatcgtactgtcagcaacattcatcgtcaagccaatcaaacgcgctaagtccatctcatctagaccatagaaataatggagattaaacaagccctgttcatttttgagaatttgatccgtatcaatctggtattgcgccgttgcatcttgtaataggtcccaatcaaaagtccgcaactcaaccgaggtaaactgcggtgtgctagctgctttttgttgatacattgccttagtttcagccacactgcttggcacgttcgtcaataaatcgttttgcacatggaaaacggtcaagaaattcttagtgacctcttgataatccttggcgtaaaccggtcgtagcttgaaatagtcacggagttccacaaaccgtgtttcgcggaccgcttcgaacaatgccacacttaacaaatcatcgttaaaaaaagcttgtggttgcaatggcgcatacagttcatacaccaacttgcggccagttccctcatttttttgatacgtccgcattaaaccaagtgcttccaatttgctgcggctgtcataaaaagcaggtaaatcaacactcaacagatttaacaaagtcgcatgtgtttgaaaatgttgttccgtttctttcttggtttgactccataacaaaagatagagactgtaagcaacagcccccattaatggttgatataagtaagtgacgactgtttgatcgaaatcggtcaaatagttagcttttgtcactgaaaagccgtcttttggactcaaaaaatcaaatgcatctgacatcggctaacccctcttccttaattcgatttcttcgtcttttctttattcatcatttcttgtaattcactcataaagacattcatatccttgaattcgcgataaacactggcaaagcgaatgtaggcaatctgatcaatatctggtaacaagcgcatcacgtattctccgacggcttgtgaagagacttcgttttcacccaatgagcgaatcttattctcaacttcatcaactacttcagtcatttgctccattgtaacggggcgtttttcagcagcacgaattagcccgcgcaataatttatcacggttgaattcttcgcgcgttccgtttttcttgattaccaacaatggggtttgttccactcgttcgaacgttgtaaaccggaaacgacaattctcacactcacggcgacgacgaatcactcgcccttcatccgtgggacgactatcaattacccgcgaactattctgatgacaatgtggacatagcataatgacaccttcttatcttttgattaattcgtttcaaattcaatccaattttaaaacaattagtataacagtagtataacatgccaggcaagcaggctaaacaaaaaatgtatcagtctcaaggcatttcgccttttccaaacaaaaaagcggtcgaacagaataatctgttcgaccgcttgtattacttgttatgacacaactgttgtaacaacgccaaaacacgttgccgcaacattgcaggtgtgccttgattatcaatcacgaaatccgctcgcgcttttttggtcgccaaatcactttgactatcaattcgcgcatttgcctgttctatagtcaattggttacgcgccatcaaacgttgcaattgtgttttacgttcaacgtagacaactgcaacaccatcgcaatattgctcgtagtgttgttcatataacagtggcacatccaacacaaccagcggtgcatctgctgcttgcatctgttgtttaatggctgtcaaaatagcgggcccagtaatcgcatttaactgagtcaaagcctctgggttaccgaagacttgctggcccaacataggccgatcaacttgaccatttttgacaactgcttcgccaaaggctgcttgcaattgtgcctgtaccgatttattagtcgctaatacctgatgagcaacttgatcagcatcaatcaccgggattccctgttctttaaacaatgccgcaacagtcgacttcccactggcaatgccacccgttaaacctagaaaatacgtcattgaaccgcttctctcttaatctgacaccgcggacagaaatgcgtgccacgctgtgctactttaattttctcaatcggagtctggcaccgatcacacggttgccctttcttaccatagacgtgcaacatatcctgaaaggccccagcgtgacccgccgcgtttaagaacgtattgactgttgtcccaccgttattggttgccagttctaactctgtgatgatttcatcatgcaaacgatctgtttcagctttcgtcaataaattcgccggtgtttctgggtgaatctggctcaaccacaacgtttcgtccacatagatattcccaagacccgttacaattttttgatccagcaacagtggtttaatcgcttttttatgtttctgtaacgcctgatagaaggcggttttcttaaacgttgttggggttggttcaacccctaagtccttcaatccagaaacagtgttttcttgacccgtttcaattaataacattcggccaaacttacgtgaatcaagataacgtaactgttgtccatctgtaaatgtccaaatcacatgcgtgtgcttagtcattggtacggattgatcatcaacttcgtatttgccttccatccgcaaatgactcacaacagttaagttttgatcgaaacgaatcaataaatacttaccgcgtcgatcaacaccgataatttggcgtccaacaagaccttcaacaaaaacatcgtctggattactgataattttcgaccagcgaatctcaattgcttgaaccgtcttaccgaccactaattgttccaatccgcggcgcacattttcaacttctggtaattctggcattgtgtgtccccttatttcttaatatcgtaccaagttggtccaaagccactttcaactttcagaggcaccgctaatgaaaccgcagaatccatgacacttggtactaatttttctaacattggtatttctgattctggtgcttcaaaaatcaattcatcatgtacttgtaaaagcatcttggcttgtaatcctgccttcttcagttccgcttgcatcaagatcattgccatcttaatgatatcagcggcactcccttgaattggggtattcattgccgtgcgttctgcaaatgagcgcaaattgaagtttttagcgtgaatatctggtaaatagcgacgccgatggaagagcgtttcaacgtagccttcttcgcgcgccttcttcacgatatcttgcatgaattgatgaacacctggatactgttcaaaatacgcttcaataaagcgtttagcttcagcccttgtgatcccaatattttgtgataagccatagtcactaatcccgtaaacaatcccgaaattagttgctttcgcttggcgccgcatatctggtgtcacttcatcagcgctcgataagccaaaaatcttcatcgcagtattcgcatggatatcgcggtcttccttgaatgcctcttgcatattggcatcccccgaaatgtgggctaaaactcgtaattcaatttgggagtaatcagaagcaaacatctgccaacccggttgacttgggacaaacgcttggcgaatcttacggccttccgctagacggactggaatattttgtaagttgggatcaaccgatgacaagcgaccagtctgcgttaaggtttgcaagtaacgcgtatgcaccttattatcttgatgaattgacttcaataatccttcgacatacgttgactgaatcttagcgatttggcgataatccaagatggtttggacaattggtgcgtcttttttaagttgttccaagacatccaccgccgttgaatagccggtcttggtcttcttaatcactggtaaccccatcttttcgaatagaatgacgcccagttgcttaggcgaattgatgttaaacgtttcgccagcttccgcataaatcttttcttccaaaatcttcagcgtttgactgaactcgccccccatttgttgtaggcgacttgcatcaactcgaatcccggtgatttccatatccgctaaaactagcgctaatggcaattccatatccgtgaataaatcgaattgttgatgtttttttaattgttctgtcaattgtggtgctaatttgtaaatagctgctgctttttgaatcagatgttgataaagcacggttggatcgacagggactgcgcgtttagcccccttgccataaacagcttcatctgtttggacattttgatactgatgtaaatttgcaaccgttccaagatcattactgttattcgttgtattcaacaaataagacgctaatagtaagtcaaattgaacccccgctaagtgaatccctaagcgattcaccgcaacctgattgcgtttcacgtcaaaaactgctttcggacgtttagcatcttctaaccacgtttttaaaaccgattctgtcaagagtgttacgtcgtcgctgacataccagtggtctggtcggccaatgtaaaagccaatcaagtctgctgtatggtaattgtcggttaacatttcgatgccaaacgcaacgttttcagtggttgtcacgacatcggcgatgttatcaagggttaatactgtaaattgatagtcttcagtagccgtgggttcaactggtgcaacatctaattgatttagaaacgacttgaagttcatttcttggtaaaaagcaaccaaagctgccatatcaggtccgttgtacaccacatcgtctaagccaatcgtaattggcgcgtcacgtttaatggttgccagtgtcttactcgtgaaagctaggtcgcgatcttcaatcaaatgttctttcaatttactctttttcatttcatcgacatgttcatagacaccttcaatgtttccaaattccgtaatcaatttaagcgcagtcttttccccgacctttgtcaccccgggataattatcagaggtatcgcccatcaatccttttaaatcgataatttggcttggttctaaaccgagtttttcttgaacgtgttcaggggtatacgcttcaatttcattgacccctttaacagtgatgttaacggttgtctgactagtcgtcaattgagttaaatcgcgatcaccagtgacgatatcgaccgtgaaaccatcagcttctgcttgtttagcaagtgtaccaatgatatcgtccgcttcgaaattagcgagttcataagactgaataccatatgctgttaagagttctctgatataaggaaattgttccgttaattcaggtggcgtttttgaacggccccctttgtagtcggcaaattgttcggttctaaaagtggttttgcccgcatcaaaagcaactaacacgtgtgttggttcaatctttttcagaataatatccaacatattcttgaaagcataaatcgcattagtgtgcagtcctgcctgattggtgaaatggtctaaagcttggtgcattgcaaaaaaagcacgaaatgcaacactattgccgtcgactaataataattttttttgagaacccatgttgttcctcctacattcgtaaagtgactagctctattctaacaaagaaagtgacgcgcgtcattatgcgcgaccgttgctaatcgcacaaaaaaaagccgcaacaaatggttgcggccttttttaacgtttattttgcttctgggcgatccatgttcattgatgccatgcgaccaaagatttttttgctttggtcgattgttgcgccaacagtatcttggccgatttcattttgtaaatctttgtacaagtctacgtaatagaacaagagatgacgataaacttccaaacccttttccgtcaaatgaacacgacgaatgcgttggtcattttcatcagattgttctgcgataaaagccatcttacgtaatgaacgacattgacgtgaaatcgctgaacgactcacttgcatcttatctgccaatgcactgttagttgtttcattattcgcattttgaatctcgtgcatcactaaaaattggtcgaaagataaaccgtatttttggctttcacgactcattgattcgctaaggttgttaatcaaccaccggtataaacctgcgaattccataaaatctgctgatgtgctaccgagtaaatcggtgttattactcgtatccatttctattcctcctacatgctgaaactttcagtatcaatagttaaccatcgataagtttcatactcacactattcagtacttcaattcttccgtgttctaagatagccgatctaaataatacttagtcagctaatcttaaccgtacttcgatttaaagcaatataaatagtctatagtattaaattatatatttcaactaactttcactaataatcatcaacaacgttcattatgagttgccctgacaacctttattaaaggtaatttattatttattttaccaaaacaatccacgaagtaaaaaatacagcctcaaaaaaggctgtatttaaaattacttaataattgtgattgtaatatgacgacgaccccaactcttacatgccgcaacagttggaaaatgaacatcaataatgtgacctttaatcgcgctacccgtgtcaccagcaattgcatacccgtaaccaggtaccaaaacaagtgagcctaatggaatgacactaggatcaacggcgatacaatttgggtttttagttaaatcaattccagttgcaccaaaatggcttaaaccaggttgggcagttgaataagccgttgcttgcacttgaatcgcttgtccggccttgccatcagtagcgcttgctaaatcggcttgctgagcatttgtgtccacaactggtgcaattggcgcttgtgctgcttcgtcggccgcttttttagctgcttcagccgctttggcttcagcttcttcacgtgcttgttcttctgctttttctttagcaatttttgcaagatccgcttggctttgacttaaattattctttaagccagccacttgttgttccagttcgacagattgttgatccaaactgcttcgttgttcatcaagttctgtcttgctagcttgtaacttatcttgaatggcttgtgtatcacggtaactctgtgctaattcatccatattatggttgtcagcactttgaagaaccgtcaatgtgtaagcccggttgaagaaatcactcaaagaatcagctgacaatagtgcgttgacaacgttgcggtcatcggctgttcgttgaagtgattgcaagcgttccttagcatagcttttacgttttgctaaagtggcttgttgctttttcaaaagcgtttgtgcttgttcgatatttttttcgttatccttaatcttttcctttaaggcattaatttcttgatacttcgcattcacgctcgttaaagtggcttgaatcttcgaatttgtatcatcaatacttttttgggtactgctttcttgggcttgtaattcgctcaaactggcagcactaacagatgtgcccatcgtaaccattgcaactaaacaggtaacaacagctaacgctagttttctaaatcgcatcttgttaaactcctccattcataactcagacttgattatacgcaacaatccccgcaagaagattgcagattaatgacgttatattacagtttgaagacatttataatttttgtgtaataaaaacccacttgtaaccgccgacaaaccaaatacttccaatagaaaaagctaccacaaaagtaaattttgtgatagctttttgactttatacttagattttaattaaaggactaacctttaatccgaactgcgcgggccatttcacgatcttgttcttttcgtttcagtgtttcgcgcttatcgtattcccgtttcccttcaccaacgccgattaaaactttggcaaagccgtgtttcaaataaacccgtaacggcacaatcgtaatccccttattcttcgttaaagcaccaatcttggtaatttccttcttgtgcaacaatagcttccggttgcgcaatgggtcatgattaaactgattgccttgttcataagggctgatatggacattttcgagataggcttctcctttacggacgcgggcgaacccatcacgtaagttgattttgcccttacggaccgatttaatctcggtaccagtgagcactaagcctgcttcgaatgtttccaaaatattataatcgtgaccagcttttttattctgtgcaattaaatttgctggtttttgaggatgtttctttgccattcaatcacctactttttaaaagtacgtttttgtgagtccttgttcgcagctgggcgtcttggatgattgtttttcttttgatcaccacgacgttgaccgcctttttcatgatcacgtgggcgtgctggacgctttggtcgtgcttcaatcttgcttaagatttcagccgaagccaatggcacttcttcaccggctaataattcaaagtccactgagtgggcatctaaatcaacattcgcgaccttgacccgtactggttggccaatgcggaacatcttatgcgttctttcaccgacaagggctaattggctttcaacaaagctatagtagtcatctttcatctgtgagatgtggacgaggccttcaaccgtgcttggtaatgcgataaacatcccaaagctggtaacagaactaatgacagcgtcgtattcattaccgaccttatcaagcatgtattcagccttcttaagatcaacgacttcccgttcagtatcgattgagcgacgttcttcaagggatgtttgttctgcgattggttgtaacttaggtgcccatttttctttttcttcaatcgtcatcccatttgtggcataactatgaatcaaacgatgaaccatcaaatcagggtaacgacggattggagacgtgaaatgcgtgtagaattccgcacccaaaccaaagtgaccaagggattcatcagaataatgtgcttgttgcatacttcttaataacatcgttgtaataatcggttgttcaggttgaccttcaatttgcgtcaagacttcttggagcatcattggcgtcactttcttacttgaaccgtgtgcttgaatcccataagccgtgataaattcaaagaaattcttcatcttatcagcatctggtgtttcatgaatccggtataagaaaggtgcattagcagtactgtaatgttctgcaaccgtttcattagcagccaacataaatgattcaatcatgcgttctgaaagaccgcgttggcgtaattcgatgtcgatggccttgccattttcatcaacgataatcttagcttcgtcttcttcgaaatcaattgcaccacggttatgacgcttcttcaagagaatttcatgtaattctgacatcatttcaaacattggcacgagccgttcgtattgcgcccgtaagtcagcatcttgatctgttaagatcttattgacgtttttgtatgtcatccgcgctgttgacttaatcacacttgggaaaatcttgtgatccactaccacgccgtgttcattgatttccatttcacacgttaaagcgaggcgttcaacgtctggatttaatgagcaaatcccgtttgataagcggaatggcaacattggaatcacgcgatcagttaaataagtactagtcccacgttctaaggcttcaacgtctaatggtgaaccttcagtgacgtagtaactcacgtcagcaatgtggacccctaagtagtagttgccgtttgccaactttttaacgttaactgcatcatcaaaatctttagaatcgtcgccgtcaattgtcacaacgtcttgatccgttaaatctttacgacctagtttatcagattctaaaaccgtatctggaatcgcttctgattgaagccgaacttcttctgggaagtccgtcttaatatcatgttgatacacgattgataaaacgtcaacgccgggatcattcttgttaccaagtacttgtttggcaatccccagcatttgacctggcgcctcaacacttgggtaaccggtaacgtcaacttggaccatgtcacccttttgtggatgtaacccattatccgttaaataaattcggtaattacttaattttttagcatgactttggatgtatccaatccagcctgttttttctttttggatatctgaataaggcatgaattcgccgacgatttcttcaatcccccgcgtaatcactttcgccacttttccttcaggaccgcggcggctgttttcttcggcttctttaatgatggccacttcaaccgtgtcaccattcatcgcaaaattcgtattgggtggggcgataaagatatctggatcattaggttccttatcaacgattgaaacgaagccaaagccacgatcgttagcatggaagaccccttcaacaaggcggttgctagctggtaatctgaacttaccggcatcgtccatattcaatgtcttatctccttctaattctgctaatactttcactaggtctttgaacccttgtgaaccggcaacgccgattcgttcactaatttcggatacgtttaattgttgcgttgcatctgcttcaaaaattgcaagaatcgctgctttcatctgttcaacttgtgtcacatcaacacctctttctcatttcttaaaacggtttataaattctaggacatctgtttctaattggtgatgcgcactatcgaccgtaatgacgtggccggcttgtggataccaatgataatcaactgttatgttttgttgcgttaattgctggtgtaagacttgggcttgtgttggattaataacttgatcttgtccgccttgaccgatgaagaccggtttatctccgatttgcttcaagtcagccacaacttgtcgactgaaaatgccaattgatgcaagttgttgtggtaattgctgattaatagtcgccaaacgtgctgtctgttgcgcagccgggacgcccattaactgcatgattcgattagcatattggccaaagagcggcgtcaatttagcagtcggtccttcgagtactggcgcactaaaaatcccaccaccacaaacttgtggtagttcttctaatgcccgcatggcaaacaatccgcctaatgacaatccgaaaacaaataacggttgtttgttagccgcggataactgctcaatcgcagccaccgtatcggcccaccatgcatcgacagaaccgcgcgttaaaatctcggttggatcagccgttgcatgccctgcaaactgtggtgcactaaccgccagctgatttttctccaaaaagcggcccatcatacggacatcattagcactacctgtataagcatgtaacaacacaaccccgactgaaccaccgtcaaaataaaacggttgcggcaaccgataagacatgcgctcacccccaaagtccttactgcttgaattcatttaaaaaggtctcctgccattcaacaggagaccgcatcaacgttcttattagaattcgacccgtctcacatgtattagtgttatgataagtacactaaagctaatgcaaagacgaagaataaagcccctaaaacaacggttactttctgcatgaaagcttcgaaaccacgggccttttgcttgccaaataaatcaccagaaccacctgataacgcactcaaagcatcctgttgtttacttggttgcatcatgactgcgatcacaatcaagattgaatcgattaataataagttcaggataagattttccaacctaattccctacctttctatctacactgtcttttaatactttagcataaaaagtagttaatcaccacttttttatcgattatttcacgagattctcatccgtatttcgcaaggcttgggcagcgtcttcaatttgccgccgcaccgtcgcccgtagctgatgatccgttaacacaatcaacgtatcaccagcacgaatcaacgtatcaccatgcggaatcagttcggattcgccacgaacaatcgcgattaacaaacatgtctttggccagtccacttcacggacttggcgatcctctaacggtgcgcccgcaaacactggtacctccaagcgatcagagaatgttgctaacttacgatatggtttgccaagtgcgcgttgcaataatgatgcgtaaattggcgcgccccccattaagtcaacgacgatgtaggccaccaacgataaaattgctaatggcatcaagtgcacgagcgaacctaccatctcggtcactagtagaatggccgtaaatggcgccttcccgattccggcaaagtaaccacccatcgcaaaaataattaagttgggaacataaactggtgctaaccaaccaagttgaaccattatgagtccataaagggcaccgattaaagctcctagtgataaaatcggtagaaaaatcccaccaggtaatcctgaaccgtatgaaatcattgaaaaaacaaaccgtaataggaatagaccggctaccacactgattgtcggtaaattttgtccaaggtgtgcaatcaatccattgccaccacccaaaatttcgggccagaaataaccaatcggcaaaacacataataatggcactaatccggtatacgcttttggcagcgggagcttcgcataaagttgtggtaaccacaataataccttctgataaacgtatcccaacagtcctaatacgacaccaagtatcaacaaatgccaatactgattaattggcaaactttgggagtacgtaatatgtaatgtcggtgtcaaaccaaaaaaatttaatgaaatgaagttcgctgcaattgcgctagcaagcgacgtcacccaaactaacggtgaaaagttatggtagatttcttctagtacgaaaaaggtcccggcaattggtgcattaaacgcagccgataagcccgcggcagccccactagcgattaaaatccgacgatcagcaccgcgatttaccaacttagcggcgaccccctgtccaacggcagcccccagctgaatcgatgggccttctcgtcccaagaataagccaggtgcaatacttaaaatgcccccaacaaatttacgccacaggattgaccaccaattgaaatcaaactcaccttccaattgtccttcaacttgtggaatccccgaaccacttatattcggttccttttttaataattgtgccacaagcaggccgatcaataaattggcaccaaccaatggcacccaataccacgggtgtgcatttaacccttgatagatagtgataacaaaggccagtcctttttcaatcgctaagcgaaataaactgaccaccaatccagtgaacgccccaactaataaccctttgcccacaaagcgaaaccgtgtcttattaaactgactagcacgtctaagtcgtccattttccacgtttgcctaacctccatctgataatgctttatatacagactaccacggaaatggggattatcaaatgttgaaaccaaataaaaaggcgagcactattgctcagcctttattgatagatgtctacatcagatattagttaatcacttattaagttaaaactcataagcaacacaatctatcttatcatgtataaacccgaatgtcaacaactttttttaagtaatattcattcaacgttttgctacatgctcatctctcgacgacatagaatatcttaccatcctagtgggacaacgtcaatcactaatttgaaaaaaattcaaaaaaattgaattcctgtataaatatcgaaaaaataattcatatcacccggattctcatccctaatctgcgctattgattatccctcataatacttttaaactgctatttgttccaattttatccaaattggtataggtaaacaaaaagatcctgcaaaattcgcagaatcttcacgtcctaatagaagtcttctaggttttcatagtctaatatcgcaatctttcgaccgtttcgttcaattagcgcatgactttctaactgttttaacttacgcgataaggtttcaggcgttgttccaatatatgttgccagttcttttaacttcatcggaatcatcacttcagtttctccgctcgctttagctaaatcaagtagataagtcacgattctggattcaactgactcgatattgattaagttcgcctgtttttccaaacgcgtcatcttatcagtagttgcttctagtaactttaaactaatttcgggataggctaacagtaactgttgaaaagcactccgcgataacgtacagattgtactatcttgcaagacctcaccgtacaacggctcatcttccgttttaaaaagtaacttttctccttcaaaatcaccgggttccatcatgcgtagcagttgctctttgcctgctgtagagagctgatagaccttaatgctccccttagctaagatcactaaccgcttctgatccatcgggctcatcaccaacgtcccttttttaacgcgttcatgatgggtaactgccgaaatcttgaccaaactatcacggtctaaatgattaaaaatcggtactatctcagcacaaatatgttgttcgtcagtcacctagcccacttccctctatcttaatcgtcgtcttcttcatctaatccttcgcgcgctgcttttcctagttggctttgcaattcacggatttggtgttggttgtagcccattaaagaaaccatatccgccgctaaagcaaatcgttcttctttttccgcaagtttaatcgcacgggaaacaaatagattagcagtattatagtccgcaaccatttccgcaatcatcgctggcatctcccagtacttaatccgcggctcttctgtcagcatcccatactcggtatactcagcttgcgtcgtcggaagcacttcaccttcgtctagtagccgttcggccgtcttgtctaatagcatatcattttctgcaagcaatgtggttaattgcgctttaaaagcttggttattgattcctttagcgtaccacttcatttgacggagtttacgccgttgaatcgttaagttagccatcacatggccgatcatggcacccgcggttggtgtatggtgatcaacatcagcttgtttaacttctgcttggtaacgtgtttcgatttcttcattagataacatattaattgccccctatttcactttgatactttgaacgctgtagcccaagtcagttacagcttgtgttaattcatctgggtttgtcacggcttcatcgtattctgctttcactttactagcattaaagagaactttcactgattcaaccccatcttgttgactgacacccgcttgaatcttttgcatacatgacggacatgatagctcgtctaattgcatcaccaattttgccatttcaatgaccaccttttcgtttgattactgttactataccgcgcgctgcatgattaaaaattgaccgccatcaagtttagcgaactttaaaccgaatcaggcgcatcgcattgaaaatcacgaccagaatactaatctcatgaacaaacatcccactagccatctgtacccagccaagcatcaggccaagcaataacaatccgaccgttccaacagcaatcacaatattttgaactgtattacgtgccgtcgccttcgtgaggtaatcggcatacactaattcggataacgtcgattgcattaacacaatatcggatgtctcaatcgcgacatctgtcccagaacccatcgcaattccaatgtcagccagtgcaagcgaaggactatcattaatcccatccccgataaaagccactttttgaccgcttgcttggtaggtcttaatgaattcaaccttctctgccggcaaaagattcgcgtggtattcagtaatcccgacggctttggcaattgctgcggccgtctggtcattatcgcccgtcaacatgactaaatgtttaacgcctgcttttttcaaacgcgttaatgctgccttggcttccggtttaaccgtatcagcaatcccaattaataaaacaacttgttggtcaactgcgactaatacggttgattgccctgctgtttgactggccgtgatcgccgcaatctgcgcaccggttaaccggatccctgcttcagtcatcatcttggcccgcccaatccgaattgtttgaccagcgacttcagcttgtacccccaaccctttgagcgtttcaattcgttcaatagttggtaagtctgtcacccctcgttcccgtgcatactgcacaatcgcagtcgccagtggatgatctgactgtgcttcaaccgcggtagtcactgccaacgttgcttgttctgccgctgtataaaattgcacatgtgcaactgccgtgtcccctttagtcaatgtcccagttttatcaaagaccatcgtatcaatgccagccatcgcattaacgacttcgccgcctttaatcaaaaccccatgcttcgcgccattgccaatccccgccacgattgaaactggcgcaccaattactagcgcacctggacaaccaagcaccagaatcgtaatcgcgagtttaaagtcgcgcgtgattaagccaatcgctaatgccaacactaaaacggccggtgtgtaatacgtcgcaaaacgatcaatgaatttttccgcgggtgacttactatcttgggcctcttcaaccaattcaataatttgggcaaaagttgtatcatccccaacctgcgttgcggtaaccgtcaatgtcccgttatccacaattgccccggaataaacagcatcacccactattttcttaacgagttgtgcttcgccagtgatgctagcttcattgacataggcactaccttggacgacttgcccatcaaccggcacctgagcgccagctttaaccaatacttgatcatcgatttcgacatcatcaacacccaccgtcgtagtagtgccatcggccgctaacacttgtgccgtttgtggcgccatttcagacaatgcgcgaattgattctcgtgtctttttcaaggttcgttgttcaagatagctcccgaataaaaagaggaacgtgacaatcgccgattcattgaactcaccaatgattagcgctcccaataccgcaatcgtgaccagcaaatcgatgctgacgactttcacttttagcgcttgatacgcctgcatcaaaatcggtgcaacccccatcattgacgcaaccaataacagcccttgcatcacaattaccgccccaccaagccaataccagccataggccactgcaatcaatccgccaacagtcagcgcaatctgattcttcacggattgtaaccatctttgaaatttcatttaaaatcccttcttcctaacgattgtctttagtatagaagaaagccgattttaagaacttgatggttatcaagtttacccgaatataacagacaaaaaagcacaatcaacgattgtttcgtcgattgtgctttttcaattcgattaggcttcaaacccattttgatcagcgacttgcttgaaccaatgacctgattttttaatcgtccgttggcaatcatggtctaagtccaccgcaataaaaccgtagcggttcttataggcgttggtccatgaccagttatccatacacgtccacatatgataaccgagacagctactcccttcttggagggcttgatggacatacttcaaatgatcctgtacaaattcaatccggtagtcatcatcaatctggccatcggcattgcgataacgttcttcgccttcaacgcccatcccgttttccgaaatgaagcaagcaatgttgccgtaattttcgcggacgttctttaaaatatcgtaaatcccacgttcgtagatttcccacccgcgatacggattgactttcttacccggcatatcgtaattgtcgaaaaaatcatccggcatcgggccgtttgtatggtcgattggggtttccttggccttcacgcgccgtggttgataataattaatccccaataaatccacagtattcgccttaatcactgccaagtcagctggttgatagtcgggtaagatggctagatcttttaaaatcgcgaccaaatcagcggggaattcccccttcacggcaggatctaagaatgaacggttgaaaaaagcatctgcaatttgtgcggctttcacatctgccggattagtcgcatcccggggataacttggggttaagttaaggataatgccaatttgccccccttgattgcgtgcgtgatatttttgaatcgccatcgcactcgctaatgtttcgtgataaccaacttgtaccgcatgcgctaaattaatttcagctggataatggaactgatataaatagccgccttcaaccggcacaatcggttcattgtgtgtgaaccatttcttcacccgatccccgaataattcaaaacaggtttcagcataatgaacgtaagcatcaaccgtctcacgattgagccaaccaccttttttctggagtgctagcggcatatcaaaatggtataaattcataaacggttcgatgccgtttgcgattaattcgtcgatgtacgcattataaaaatcgacagcttgtagattaatctcccccgtaccttgtggaaacaaccgactccattgaatcgatgtccgaaaactattgtgtcctgtttgtttcatcaattggatatcacttttgaattgttgatacacatcagaggtccgcgctgggcccacttggttaaaaaacttttctggcgcttgttgataccaataatcccaaatattatcgcccttaccatcaccgtcaatccggccttctgtttggggaccacttgctgctgaaccccaccaaaaatcctttggaaagtcataaaaagtcatcgctagcactccttcttgtttgaatagcctcagtatatcagcttctttttaaaaaaccaactcttttatttaaatgtctagacttttcaaaaagagcgtgctatattgagaatgtaatcgattgcaaacacatgtaaaggacggtgctctacgtgaatacttttatggacacgcttagcaagaaaatcatgcctttcgcaaataagttaggccaaaatcgttacctaactgttctacgagacgcatttatgctttcattcccattgacgatgtttggatcaatcatcgtcgttatcactaacctgccatttttcaacgatgccaccaaagcgaccctaacggaactccttggtaatggacaaaatgccacaatgtcaatcatgacggtcttcgtcacattcgggattggttattatctttctaattcatatgatgtggacggaattttcggcggtgctgtttcattcgccagtttcctaatcctcaccccattcatgatgaccaccgataaaggcgttgacgttagcggtgttttaagtctcgatcgacttggcgctaaagggatgttcattgggatgattgcggcatttatcgctgcagaaatttattgccggattactaaaaaaggctggcaaattaagatgccagacggtgtcccacctgcagttgcgaaatcattcgccgctttaattccagctattttaaccttaaccattttcttagtcattcaagcggcagtcactggtttattccatgttaacttgcacgacgtgatctatgaaattattcaaaaaccactcgttggtttaggtggcagtcttcctgcaaccctaatcgcattgttctttgtccaattgctctggttcttcggtcttcacgggcaaattatcgtcaactctgtaatggatccgatctggaacacattaatgctcgaaaacttggaagcttacaaagctggccatgctttaccacatattgtcacgaaaccattcatggaaactttcaccgtaggtctcggtggttctgggatgacattagccgtcgtcttactgatggcctttatcatgaagaaaaaacaataccgcgatgtcggacgtttggccttggcacccgctgtcttcaacgttaacgaacctgtcattttcgggttcccaatcgttttaaacgccacaattttcattccatggctgattgcaccactgattgtcacagcgctcaactacactgtaatggcaatcggattggtgcctgcgccaactggggtttcagtcccatggaccgtcccaatcttcttcagcgggatgctcgcaaccaactcagtactcggcgggatcttacaactcattgacgttgtgctagtcggtctcatctggttcccattcattaaaatgctagatcgccaaaaagatcctctggcaaactaaagattgttttaccccgttgtttccactaaactataagtagaaagcggggtattttttttgccaaaatacgaagaaattgccaacattattcgacaacggattaaacaagggcgctatcctgctaatacgttgttacccaatcaaaccgacttagttcaagaattcgatgctagtcgaatgacgatcaaaaaagcaatcacgattttaacgatggaaggactcgttctatcacgacgcggcgctggtacaaaggtgttagaccactctttttggaataaatcaacggcaccagcggatcaataccgtgggatgtcacgcgacttagccgacattggtaaaacactctcaagtaagatcatcacgtttgaggtgactttcccaacgcctgagattaaagagcgcttaatgcttgctgatcaacagcccgtctacaaaatcattcgactgcggattatcgacggcgttaatagcgtcctcgaacatacctacatgccagtgagcctagttcccggattaaccgatgatgttctcgcacagtcaatctacacctaccttaaggagaccctacacctcacgttcgcgggtgcctttcgcaatattcaagccgataaggccgatgaatatgaccagcaatatctggactgcgccccaactgatcccgtcttagaagttgagcaagttgtttatctcgataatggccaaccgattgaatactcaagaagccgcaaccgttatgatcgccgcggttatacattcttagacgttaagaatacttaattgcactaaaaaaagcctgccagcatttagctgacaggctttttctagtgattatttttcgacatcttgtaatttttggttgtcgtctaattgtgagcgaccaccgttgccgattttttgtaaatgattcattcctaaccataatagcaagagtgctacgacgatgaaggctaagagaacaaagaatgattgaacaatttgaccggtacctaaaccagatgtaattgcttctctgagccctagaattgaatacgtcattggtaagaatgggtgaatgacgttgtagaagtggttcgtgatttccattgggaatgtaccacctgaaccccctaattgaagcatcaagaggaccattgctaagaaacgaccaggattatcaaatgtcattgataagaacataatgatcgacatcgaagcaagtgagaaggtaattgccattaggaagaattgtgctggatgatcgacgtttaatccagcaaccatcattaaggcaggttcgataattgccatcccgacagcgactaaagcgccaaccgtgattttacttaagaaccatgctgttgatgattgaccagtcattgagatcttccgaattggataagcaaagttgaagacaattgcgccaacgaacaatgctaatgaaagaacgtaaggtgctaaggcatgaccgtagttaggtacatagctgtaatttgaatgtttcaattcagcaggtgcagcaaacatatcggctgtcttatccgttaattgaattgagttaacttcatttgcaccagatttcaatgcagatgctaatgttttattaccatctgttaattgaccagcaccatctgttaacttagctgagttatccgttaattgatttgtaccagcagctaattgatcaacaccgcttgttaacgttggaatttgaccatttaattgaccaagaccattgttcaaggctgttgaaccagttgccaattgactgataccacttgtcaattgaggtacttgggcatttaaagcaccagtaccggcagcaagtgcagctgaaccagttgctaattggctaacaccgcctgttaaggctggaatttgaccgtttaattggtttgtacctgcgcttacttgtgaaacaccaacagtgtaagcatttaatcctggaattaagcccatttgacttggtgtaccaacaaggcctaatttcatttgacgtaaaccagcattaattgttgcagttgcttgaatagcacccatagtttcaggtgtgttacctgttctagtcaatccggcactaacagcagccaatccacccgtcaattgattaattgcagaattaacaccatctttaagaactggcgaaactggagcaataccattgattcctcgcttcaactgtgcaagactctgcatcaacgcagtcatctgtgtttgaatcgatttcaaatgtgccttattatcaagtgtatttgccttaattgaattaacgtcagtaccagatgaagctagttgattacccgttgcagcaacacttgcacccgcactttgtaaagcacttgttaatttctgagccaaggctggattactccctaaggctgcttgaatctgtggatctgaaacaacctctgtaattgcttttaattgagcaccagtattggcgacctgactagcagcacttgcacttgaatcttgatcatacagctttgtattcacttgttggagcgaactacctgtacttgcagtatttgtagcaattgatgttaaatcagccgtcacttgattactaatttgatcagttgccggattattgatacctgcatataactgttgaataacatcgttcacctgagtaagtcccgaggttaactggtcaatccctggtgcaccagtttctaattgattatcaatggtttgagcgacatctgttaatgctacattcaatttctggctaccatcaattaattgatcagtcccaccatctaattgactaacaccgttcactaactgactgctactgccattaagtgtatttaagccagtacttagtttcgtaacaccattagatagatctgtcgctttactgttcaacgtttgtaacccagtatttaattgactagccccactatttaattggcttgcgcctgatgcgagtgcacccgtcttactatctaataatagtaagccgttgttaagtgtgtttgagccatcagctaattgtttaacaccatctgataatggcacaacacttgttttcatcgtcatgataccatcgttgacttgagcaacaccggctgtataaacatttaaaccatctgataacgttacagaaccgtctgttaattgtttagcacccttggcagcagtactgaaccctttaccggcagtcttaacctgtttgaacatcactttagcgtaagcatttgtgacagtttcccgaacttgggcgttcaattccttggcacccatttcactgataacttcaccgatgaagttcaatgaatcgttggttttgtattgaatttgcatcttcttaggattcttatccaagactgtagcagcattggcagagaagttcttaggtagggtcactacagtgtagtattccttatctttaagcccctgttgtgctttttttgctgatacgaaacgccaaccaagttggtcgtttttcttcaattcttttaccatatctttaccagcgctcaacgtttcaccgttgtaagtggctggttgatcattattaacgacagcgactggtaattcaccagtgctaccataaggatcccagacagatttaaggaaaaagatactgtacaagaatggaataaacacgattgcgattaacgaaatcatgattaaacgattcttggcaatgaacttaaattcgttttggatcatcttcatgctaaaatctcctttaattatataagttgcttaattgattacattcaatatccacgataactaaattagtctaaccttttttcatttaaatttcaagtcttatgcgccaaactattctctattcacaactgtttctaatctaacaaaaaaagacggtcgttatttatataacaaccgtctcccttatggaagaaacaaatgccttcctattaaattaattattttgcttcaatcttcgtcatgccacccatgtatggtaccaatggttctgggattgtgacgctgccgtcttcgttttgatagttttccaagatggcggcaactgtccggccgactgctaagcctgaaccgttcaatgtgtggaccaagttgacgtggccatcttcgtcacggtaacgaatttgggcgcggcgtgcttggaagtctgtacaatctgaacaacttgagatttcgcggtacgtattttgagctggtaaccaaacttcgatatcgtatgtcttagctgatgtgaagctggcatcgccagttgccaatgtgatgacgtgatatggcaagttcaatgcttttaagatattttcagcatcggcggtcattttttctagttcattgaatgattcttctggtttcgtgaatttcaccatttcaactttgttaaattggtgcatccggattaaaccacgggtatcacggccagcacttcctgcttctgaacggaaagctggtgataaggcagtgaagtagattggcaattgtgcgccatccaagatttcgtcgcggtagaagttcgtcaatggcacttcggcggttggaatcaaagtcatgggttcgccttcgttggtcattgtgtaaacatcttccgtaaacttaggaaattggccagtcccaaacattgattcgccattcactaagtacggcgtgatcatttcttcatagccttctttagcatgttgatccaacatgaagttataaacggcccgttcaagacgtgcaccggcacccttatagtaaacaaagcgactacctgatactttagcggcgcgttcaaagtctaagatgcctaatttttcaccgatatcccagtgtgctaatggttcaaaatcaaattcacggggtgttgaccatttgcgttcttcacggctaaaactttcatctgggccaacgggtgctgaatcatctgggaagttgggtaagcgtactaagatgtagtccactttggccttcacttcagccaattcgctatccaaagccttgatttcggccccaacattcttcatagcagcgatttgttcagtcgcatcttctttattgcgtttggcaacggcgatggcttctgaggcagcattgcgatttttcttcaattcttcggtcttcacaattaaggcacggcgtttttcatctaatgcgatgacctcatcaatttctgcagcttgaacaccgcggctagctaacttatcctttgcccattggacattttctcgaatgactttaatatctaacattgcactctctccttttaatgatctttaattaacaacaataaaaaaagccttctcatcccttaattgggacgaaaagacttcaattcgcggtaccacccaagttcacccactacaaataataggtgccctcaattactgataacggccaggaaccgtgtagttcatcactacccactattgcgctggaatgctggattcaataccttccaccaaccggtatctctctgtcaatccatataggcgcttattcacgtgtttacttcttaatgtaagaataccgcatttaatctttaaattcaatcatcaatagatgatttttgaatccatagaccccgtaataaaccgagcatacgtccaaaatgatcgctatctgcattttgatgccatttaaacatcaccgcttctgggttaacgatgccagttaaatcaatgatcgaagtcgtaaccaccatatcagcatccattaaatccgcgtcagattgactaacatccgcatacaaaacactattcagtgcagtcatcaaatcaaagtacccgaggaaggattgttccgtcacaacgacaaccttcactttattcatcggtgcaaaccgttgaatcatctgacgcaagacgttgtagtaaccactgaccaattcttcacgtaatttgactaagaatgacactttcggattgattaataagtaatccaccgtatcatcaatattttgttttaggacatcatttggcttgagatattcaacactttccatcatttggtcagcgagcaccgatgtcacatcttgtttaaacatgtacgtggtcatcgtcatcgaaatcatcgtttgcacgaaaccttgataattcgcatcgtctaagtttaggtatttcttgatatcaaatggaatttgatcaataaaagcttctacaaattcgtaaatcactggaatataccgcttgtatcgcgtttcgtaagattccatgtagggattagcatcctgaatctgaatcggtccaaaattaatgatgtcatatatattgaatgattcagccatcgcttcttcttgggtcatttgtgcaagaatgctcttgatccgtaaagcttggtcttcaaagggctattttagatattcagaaaccatattgggaactggataacggataaaatcgccatctagttcagttgaaaccgtgtgaccttgtagtaatcggaaataggttagaacgattgaatacgcccctagttcacgggtcaaaatattggttttttccaattggaaccgatcaatcgcaacatcgaacgccttaagtgcatcgtctcgtttaacatcttcaaagggccaggtatgcccttccgttgccatccagaataacatcgttaagactaaatgaattttattttcgtcgtcttctaaccgaagtggatcataatacatacggatatcaaatgagcgaattaagtcgcgcaccccttttaaatggcgtagcgccgttgccttactcgtatcatgggcttcccagaattcttggaatgtaacggtctcacccttgagtaagattttgataaaatcaaacgcttctgacttattcactaataaatagtgataggcatctgttggaacgctgaacaaggttttaatatcatcaacatccggtccgataatttcctttaggtccccaataatgctcatgtacatattgtacaagctaccgtaactgcgatttaatagcattgctacttgttttagattcacatcttcaacgagcggctgattattacgcgatagttcaatccgctttttaacaggcaactcatcccgttttaaaccaacaatctccattaataaggcgtacttatcattttccgcttgcgttagaaaaatactctcacttgcgttcaaaccgattccccctagtaaaaatccttataattagtaattaatcctaccataaattgtgcaaatagtaactattgcgttgtttaaaatcaaagattgctttttacgtcagaaatgctagaatatttaagtgacgtttggttgtaaaacaccatatgttgtatatcaataataatttaaacacattttatggtcaaaagagggagactgatgacattgctcgtacttgctggcacaattggtgcaggaaaaactagtttaaccaaatatctatctgatcacttaggcactgaagccttttacgaatcagtagacgataatgaagtattaccattattctacaaagatccaactaaatatgcgttcttactacaaatctatttcttaaacaaacgatttgatagtatcaaacaagcatatacagatgataacaacatcttagaccgttcaattttcgaagattcattactcttccacttgaacgctgatcttggtcgcgctaccgcaaccgaagtccgtgtctacgacgaattattagccaacatgatgcaagaattgccatttgctgcccacaagaaacgccctgacttattaatccatgtacgcgttagtttcgaaacaatgctttcacggattcaaaaacgtggtcgttcatacgaacaactagaagccgatccaaccctctacgactattataaagaattaaacagccgttatgatgcttggtatgaagcctatgacgaaagtcccaagatgcaaatcgatggtgacaaattagacttcgttgaaaacgaagctgatcgtcaaaaagtcatcgaaatgattgacgaacgggtgaaagccttaaacgcagaacaagaagcaaatatgggtgcctaattgcacaaaaaaagccgttcgacaaattgtcgaacggcttttttattatgcttgggtacctttttgcatccataattcatgaataatgccatacagccgggcatagtgatcgctactagcctttaagcgccacgtaaaatacaacgcctccggattaacgttttcgggtaaggcaatgctcgacgtccgaacaatcaggtctgcatcccgtaaagcttcatcggtcgtactaacagcgacatatttgatattatcgagtgctgttaagatatccatatagccaatgtaatcttgctcaatcacgagtgcgaccttcacctggcttacaggatgatactgctggatgacttgttgaattaaattatagtaagcctttatcaaattctcccgcccacttgctaaaaaactaaaagctggttcgaataagaggtaatctacggtatcactaatttttttatggagtagttcattgggttttagctgcggcatacgaatgactaattcattaaaaacgacagaggtcgcgtccatcccaaggatataggtcgtcaccgtagtcgttaacaacgcatttttgaaaatatcatatgtgtgctgcgaaatctctaactcatgcataatatcaaatggaatacgctccaaaaaggcagtcacaaaacgatgaatttctggtatataacgttcatctgcccaatcagcagtcaccttagtacttgttattgagcgtaacggcactggacaataccgtaacaagaagaatagtccagcggcttctgaacgcccttccgttaacgttaactctgccaaacaagttcgtaatcccattgattctttagtgaaatcggctgcaagtaaatcactgattaaattaggatagggataccgaatagttgctaatttttcatcgggctgcacgactgcaccggccatcactcgataataagttactgccagaatcgtggcgccaatttcgtgcgttaataggttaggcttttgcaattgaaattcatcacagacatagtcaaaggccgacaaaacacattcgtgattgatttcttcaaatagccattgatgcccaccagacgccaaccagtataaggcggataagaccaatcgaattgtcttctcatcaccttccaaccggattggttcgtatgaaacccgtaagttgaaggcgcgggttagatcgcggacttgctccaaatgacgtaatacagttgctttactactatcatgctctgctaagaaggttttaaacgatatatccccgccccgcaatagaatctgtacgaaatcatagatgtcagaatgttgtactaaatataaatgatagacatcacttggaattgcgaagagtcgcttaacatcatcttcctccgtccctaatattgcctgcagatccccaacaatactgacatacgtattgtataagctactataattacggtctaacaatgttgccacttgcttcaaattgacgtcatcgattagtgcttcgctctttttagccatgctcattcgttttctaatgggtaattcatcccatttgacattaataatatctaagaaaagagcatacttatctttttctgccaatattaaataaacactattggtatccacattgcctaaccccttgttccaaataattgatatatattttaccatcaatcgatattaaagcataaccattctacagcgatatttgttgcgtataacaaaaggcgatgcgttattaacacacaccgcctcaaaagctgaaaataatttcatcatcagctctaattaaacctaacacgctaataacttaaatcaccaattgccatttcaaatcagcattatatgggccaatctgataagcatcattataaggtagtgataactgcaactgactttgtttccaaccaactatggttccataactcgttaaatcttgctcactgattggccgctgtagaatcccatcaacccattgattatcaggcgactcattagttaatgcttttgcatcactatcatttaagcggtatttaaaattttcttgcatataaaagggattattgggtcgttgatttatccccagatagcctagttgtaaatcaaaatgactacacaacggattacatatgactactttcggcgcttttggtgtaccagtatctgccacttttagttgtacacttggtacctcatttagcgcaatcgtccgattagtacccccctactttgacccaaaatttcgtcatcaaacgtaattgttttcggaatgccaacctctactgccccgtttaaagttaatttgaattggaatttagcgattggatttaaatcatcatttgcaataggtgcacttgccgccttttcagacaacgtaaactcaatgtcgcttgtccgcatgacatcacaatgcagcccttgctccgtagtagtcggattccccgtctgattctgactagcattaattagctgtgccataaagctctccgataaatgcaactgcgaatcggttatcaccggttgccacactgcattttgatctgcattaacacgatagtataacccaaaagaatcaggcgggttaactaggtcgacttgtcctgtaattccgtactgcggggccgcatgtagtgtgccatccgcataattaaactgcgcatggccattcgattttacagactgtgcatttttggcacccagatcagctaatgtgacagagagaatctcaggcacctgaatgcctggaaaatcgtggtcctggccaaaaacggctttatcatgattgggtgaaatcggagcatcgggtatgtagattagttcacgaataatactttcaagtcgcgattaaattcagtatactaaatttagataaacaaacttactggaggatagtattcatgcggacttggcaaaaatggactttgattgttctggcactcttcttaataccaattatgtattttgagaaccaatattttatgagagagcagtttaaacagtcgcaaaagaatatgcagcagtcaactttaagtgattttaatgaccaagcaagcggtcaatacgcggcctttaaaatctacgctgcagccaaaccgcatggaaaaatctattattttgtcccacaaaaccaaaatggggccaatatcgatttacaaaaacaagaagtcgcactcggtaatcagctttatgcaaaagcacacaaagaatcacccgacattgaccatatcacattgtacgtcagttatactgctaagaacttgcaagacaatacgtatgcttttaagccaaccgccgaggcttatggttttgtaaaatcacggtttaaaacccgttatcaacgcttgttttcacaaactgggactgaagccatctatgatatgcagcacaatacaacatcggtttcgtttaaagatttgcaaaaagatagcacaacaattccgatgattcgtcaacttgcaattgaccaacaattacaagcccatgattatacccccgaacaacttacacaattggaagcacttgatttcccgggaaatgatcaagcaactaattttgactttacaaccgatggtctaacattgaaattcgcaaagaatcctcttgatattgaaacaattgccctgccaatggcaacggttggtccatacctcaatcccaatcttgtcccagaagacaatcaaatgccttccaaaaaaggtggtgctaaaaagattgcactcacctttaatacgacattaaaacctagcactattacgagtgtcattaatcaactaaacgatttaaacatcaaagcaacttttttcactactggtaaagcagctaaagaacatccggatcaactgaaacaattactcaaagctggccatgtcgttggcacccaagcgtataacaacgatgatgacttggatacaatgagcgcgtcagaaattgccgataacctcaagcaaaccgatgccgcctacttcaaagccagtggtcaattgccacacttattacgggtcacaaccgaaacccctagtacggaattaacaaccgctgctagccgggcactaatcgcttggagtgttgattcggaagattggcgcttagatattgatgcgccgacaattgccaaaaatgtaaatgagcgtattacaggtggtgatcttgtcctactgcacacaagtgaggcaacgattaagacattacccgcaattgctaaagaacaaaccgctcaaaaacgacatttcgtgacagtcaacgagctcttcaagcaacgattaacaccttatcaacaatatttcaaagctggtgatcaacgctcgctacaataacgcaaaaaggcccgacaacttaaattgtcgggcctttttgtaatctaaacgtgctccgtaagccgcacgctatttatgttttgataaatcaacttcttctagtggaatcatcttagttttgtaccgtactttatagtaaacatatagtacgacaaacaatggaatgctcatataactaatcccaatcgctgtccaatcgaagttcttaaaggcttgaatatcttgccctgcaatcaccaataaacaaagcacgaatgcaaaaatgggaccaaatgggaaccaacgtgcatgatatttcaattcgctcaactgatgaccttgtgccttgaacgcacgacggaaacgataatgtgacacagcaattcctaaccaagcaataaacccagtcaacccactagctgccactaagaataaataaatccgagttccaaaaatacttgtcacaaaggttaaagcccctacgattgttgtaccaatcagtgccattactgggataccacgtttgcttgtcttagcgaaaattttagctgcatagccatcttcagccattgaccacaacatccgagatgaagcgtacatcccggagtttgccgctgataatactgatgttaagatcactgcgttcatgatgctggctgcagaagctaacccagcacgcttgaagactaacgtaaatggactaacagcaatattcgtttcactcgcgcccaacaatgagtggctatcataaggaattaaacaagcaatcacgaagattgaaagaatataaaatagcagaatgcgccagaaaacttgtttaatggcctttggaatactcttttctggggtctttgattcaccagctgtaatcccaattagttcggtgccttggaatgagaagccagcaacgacgaagacactcaacatcattggtaaccccccaacaaatggggccttcttataagtgaagttactcaagccagtaggatggccacccataatcccgagaatcgttagtaacccaacacctaagaaaataatgaccgtaatcactttgattaacgcaaaccaatattccgtttcgccgaatgatttaacgctcgtgatgttaatcaagaaaattaataatagtgcgactaagctaaaaatccaccctggcatatcaggaagccagaattccgtaacgagtgccgcggtactaatatcaaccgccaacgtaatcgcccagttaaaccaataattccaccctaacgcaaaaccaagggctggatcaacaaaccgcgttgcataggttgagaaagaacctgagacaggcaagtacgttgccatttcacccaaactggtcatcaagaagaagaccataatcccaatcccacaataggctaacaatgcaccacctggacctgcctttgcaattgctgaaccacttgtcacaaataagcccgtcccgatactaccgcccaacgcaatcatcgaaagatgccgcgtctttaactcccgcttcatttcatttcctgccataatacttcgctcttttctctatgatttcaagaaaaagccccaaccacgttctagcaaacaaaaaaacagtctttttgtctgctaaaaacgacaaaaagactgatagccttataatatccgttgatagcgccccgtaacatttcgttacgacagtccttgatttattcaaccaagtcccaacatcaaaatgaataagcaaattgacatttcggcaaattcccctttaattatccctcattactgcttagtcagttcaggataacgactcatggtttttgcgacctcttatcttgttagaaatgagtatacagaattcacacaaccacgtcaattatttccattaaaaaaccacgattatttcaatcgtggttttcattttgcttattgttctttatctttgcgtgatttccgccataaaagaattatcaatagtaggataatgacaatcataataccgataatgacatataaccaccagttattgttctctggtaattcaacggccttatcgttatattttgcaacttcctgacgggtaatctcgaagtttttagaaagtagccaactccccttattcgatgttacgcgtaacttaatattatatttaccggcttttaatggttgattctttaaatcaatcccgtaattaaagtttgaattaggggccatctctaagtcgctgcgtttgttctgatacagaaccttgtttgacccaactttgcggatttcacctttaacaaccatcttaccgactgaattagctttgacgttctgaacattggctaaaacggcagtatgactattgatcaatcctgctttcaccttattcagccgtagactaggatgcaccatttcatctgattcagtcagtttagctgcaagaatgtaggcatattggttggttaaagtagccccaccttttcgttccaacgcctgatcaacctgactcttagggacttgtgaaatataaaagccacctaaaaccagccctttaaatgattcatttggcactgttaaatcgaaagtcaccgtctgttcaccgttagccggtacctttacccgttgcgcgcccgacatcatatcactaaacgaatactttaacgagctatctcgcttagtattggttcctgtataatcaatcaatccattttcattggttgtcgctgtcgtaggggtcacatcgaccgtaattggttttgttccactattttgaacccgcacaccaacttcttgttttcgaccaggagtaacttttaaatcataatagcccaactccgtatccgtttgattatcaggatagacgggcgtaaccgaataagtcactttctccgcctgaactggttgatgactaaccatcaacatcaggccaaaagtggcaaccaccgctaataacaatccaaatcgttgcttcattcgtctcattctattcgctactccttctaattcagagtacgttttatgtaataaaataataagttttcagcaaatatatatttttaattttggtgttaattattttcttcactattaatcttaatcctttgttaacaagtggtacggcgttaattggatatgccattgtccattttttaaataaattcttaattttctgaaactatcaactaatcaattgaaaacgaattttcaatttcagcacaaaaaaagcaatccaacgatcggattgctttcactctattttaaatttttaatgatcttctggatgagtaattcacgttgttcggctgattgattccaatcaatcactggaatggcttgatgcccaattgtctcaataatcaagccagaaacagtttgccgttttaactcgttcgcccatagcatgtccgccttgtggaacgcagcgttaataatcaatgttccttgtttagcaacgggttggaagtcattgaagaccgtatccaacttacccgtatctggataagacttaatttgtccttccgtggccaacacaacatcgtagattgaaacttcatcagctggccgcgctagtgtaaaaccaccactattaccagaagccgatttcactagcccagccactactaacttacgaataattttgcgtaggtaagtctgtgacccgcctaagcgatgatgaatgacttcagacgaaattgtgtgttcaggatcttgcgtcgccaaaagtacgataatacaagttgcttgttcaaacgcccgtgttaaatgcattagccctgtcccctttttaacagtcgcgcactacgcctttcgcgtcttaatgaatgaaccagaggattgacctgcgtcggtttgtacctcaaacccatatttttcaagaatgtgtgcaactttcttaaaatcatctctatcgaacgtactgatattaccatcaattgtttcaatttccaacttattcgctaaattacagaaggctttcactgccaattgtgctaaaccaagattttggaaatcataaacagctaagcgtgaagctgctcccaatgtttcaagaactgtaatgtgcatttcttttttccatttattggtttcaaataagagttgtgcttgaaaatcaaccgttgaatgtccaaagcggtcgacgttagcgtatggtgtgtagacaaaaatcgaacttgtcgattcttgttgaccattttcgcgatagtctgtatagacgatgtactgcttaaccttttcatcattaacctgattcatacttgatagaatcgtcaaattttcgtttgcctcaatttgcgctaacttccgtgcataggcttggtcgttttcgtttgccatttgattaacccccatttgtctttcaaaccgattataccatagctttctcatttaaaccgtgatttattacggttataaccatgttatttttacaatttgaaaacgttcactattcggcggtagtactgaactcgttgcccgcctaaataatccggtagttgtgattgataagtcttctcgaactgaactttctgtaaactctcttgcgatgcttggttggttaaaaagcaggccgcattaaaggtgtttacaccagtttcttgcgcataggcttgcatcgttgccggcaatactgcgctgataatcccacgtcgttgatacgccggtaagatggcaaaactgagttcatatgccgcgactgattgtccatctacactaagggtaggggcgagcattatcaatccttgcaccacctgcgttgcgcgatcaacaatcgcccaagtatcctcatcattcatcaacattgttagaaacgactgcgcttcttgttgagattgaaaagccgtcatatttagctgcgtcacaatctttttttgacaaccaatttgatagaccacttcaagatccattggttgaaaatgccgtagttcagttgtggcagtcctaatctgcatctagaacaactcctttgtcatatcaacactcatagtaacccacttacagtgttgcgccaagtaaattcttatgtttccattaaacaaaagcgccaaatttgtggtataccactttttcagtttatactaataacgattaattactcttgtagaaagcgagcataccgatgacattccgcgattatttccatttattttcgaccgttcctcaacaagccgaatcccatgattattttttacactttattgagacacccgttcctgatttacaacggtatcccgaattaactaaaatttgtgactgggccgcttatgatgatcacagttttcgtctgtggacaagcttgcccctcgacgaattcgagcaacgttttgctgaaattgtcccattaccaagcgattcttaccagttagattacagttacaatttgcaagatacaaattttttctaaagttcatgcttgacttttaattcgaactaccgtaaattgaataacaatcataagttatcttaattcaaactaagtagtgcattatctgggtgtcagaaagtcggtgattgctgcgaaccgatcagggtaattgttacgaaatactgaatggatgattcggctaattaacaggaccgttatcacctgtaagagtggtgtgttaccttaaaatgacacgctaactgggtggtaccgcggtttccaatcgtccctattcgcatcagcgagtagggactttttttgtagagtgcgttatttagcgcttaatatctaaacatttgcatagaacattgccaatcaaaaacacatttcaactatggagggattttcatgttcaagattgcatcgtgcgggggaatcctccgttatcagtcttttgtcgcaccagcctaaccattaaacttaaaaggatgcgatttaaatgacaaaacacaaaactagtttattagaagcaagtatcgttttacttattctgctagccatcatgggtagcggcgtgattgttttccaactttcaccacaaacacccgtcttaacggcgattgccctcttgattctatgggcccgttggcggcactttagctgggacgccattcattctggtatcgaagatggtctcaaaagcggaatcattcctatcattattttcattctcgtcggcgccttaatcagtatctggattgccgccggtgtgattcctagcctgatggtctggggcttcaaaatggtcagtgtacactggttcattccctcgattttcgtcgtctgtgcgcttgtcggcagtgccatcgggagcgcctttaccgtcatttcaaccgtcggcattgctttcttcgggattggagccacactcggactaaacactaccatcgtggccgcagctattatttccggggcaatattcggtgataagtcatcaccactttcacaatcaacaaacttaaccgcagcggttactgaaacagatctatttgaacatattaagaacttgatgtggaccacggttccagcgtttgttggctcattaattttatacgctatcattggccatacctcgaaaaatgtctccctcgataaaattggtgcgacggttgctgtcttaaacacgcacacttcagttagcctacttgcactaattccaatcatcttaattttcgtttgtgctcgccttaaaatgccagcaattccaacactctttttaaacattgccgtttcaatcggtttaatctttttccacaacccacacacaccaattgctaaaattgcgagttacattgaaaatgggtttgttgcccacaccggcgataaaagtatcgatgccttgctctcacgcggtgggattaatagcatgttaagcaccgtcgccttaattatcttgaccttaaccctcggtggcctcttaatgaagcttggtttaatcgaacgcgtgatggcccctcttgctacccatcttaagacgccaggtcaattgctcagcgccgttattgcttctgggattggcgttaacctctttattggtgaagaattcctttctgtgattctccctggtaaagccttcaagagcacctttgaaaaatcaaacttgagtaatcttgctttagggcgcgcccttgaagatggtgggacagttatcaactacctcgttccatggggcgtcgctggcgtttttgccgctaatactttaggcgtccctaccttgagttaccttccattttgtttcttcagtctcttatcaccaatcttctcaattctcagtgccgttactggcatcgggttaaagagaaaaaccgcctaaacacgcaaaaaaggcccaggataaaatatcctgggcctttttttacattaattgcattaggaattgaccgccatacaccagcgcaaaactatacactgcaattgaagctggcttgcataaaataataatccatgtaaatttcttcaatgacatctcggtgagcccagccatcaagcacaagacatcgtctggtgcgaccggtaagaaaatcgcaagtgcgaagaagcgcgcaaagtttttcttttccgtaattgtcccgatatacttgtcatacgttttttcactgatgacgtgtaagatgaacggcttcccaaattgtcgtgctaataagaagttcaagatagaaccaattgcaatcccgacgtaattataaacaaacccccaaagtgggccgaataccaaaaccccggctgcggtgctaatcccgcctggaatgacaggaatcacaacttgaataatctgaatcgtgatgaaaatcagcggaccaattagcacagagtgccccaaatacgcctgcaacgcggtcgtgttattaaaaagaccaagccgagaccaataaatagccaatgagatgcttccgattaatgccatgagagacgttgcgctgattaagcgtcttgaaattgttctactcatccgctgaattccttccaaggttaattttaattataatttaccacattcaacattattttttatcggtcgctagtctgatttaaaaaagcttaactttctaagaacgtccgaaatggtttcaatccttgtgcatgatatttttcaacaaaggccgctacttctgctggatcctgtgtttgatcatcaatcacgagttgttcaacgggtaacggacgttcgttagcaattttaacatcaatcacaacaggttccttcgtgcctttagcagcagcaaaagcagctttcaattcagctaatgtccgtaccgtaaatccttttgcgcccatcgctgttgctgctgcaccgtaatctgccccttgaatggcaacccctgagtgtggttgacccttatcatcttgttcagcttcaatgaatccgaatgaatcgttgcttaatacaacgttgatgattggcatttggtatttaacttgcgtgataatatcttgcatcaccatcgtgaagccaccgtcaccactaatcgaccagatttgacggtcagggtaggcagcctgggtcccgattgctgcaggcactgcgcaacccattgtggcataccatgctgataacgtcatacgttggcctggatgcattttcaagaaacgcaccccatcgattgaaacattcccaacatcgagattaaagatggcatcgtcagtggccatctcattgatttgtttgaagacgggttccacacgtaacggtgtttgatcgttttcttcaaaactggctttccattcattccagttttctttgttggcgagtgctgctttataaaaggcagattttttggcaactggttcactcgcggctagcaatgcctttaatgccgtcttagcatccgctaaaattccgacatccacatggtgtctgtgtcctagtttagtaggatcgatatcaatttgaataaatttggcatctggcttgaagaagtattgaccgaattcataattgctaccgacaaataagattagatcagcagcttctgccaaatcaactccgggtttcgtggctactcgcccagctgaaaccatataagctggatggtcatcggcaacaatcccttttgaaagggctgatgacatcatcgggatactcaaccgatcagataaagcaaccaattcttcacccgcagcacgtgcaccctgaccaaaataaataatgggttgttttgcatctttaattaactgtaatgtacgatcaatatccgcgcttcttggctctggataattgcccatttggaataagtttgcagtggcctcgaagttatcttcaatcggttcccagcctaggttagttggaatcgtgacaactgctacgccgcggtgtttataggcttgttgaatggcttggtcgactacaagtggcatctgttcagccgtcattaccgtccgattatagactgccacatcagcaaacatggggttttcattcatttcttggaaataatccgtattcatcacacccgtagcaacttgtccaactaatgctaatacaggaacattatcatatttagcatcgtagagaccatttaacaagtggactgcaccaggtccggctgagccaaatgtagcagcaatcttgccagtcgctttggcttcacccgccgctgctagtgcaccgacttcttcatggcgcacttgaatgtaacgcataatcgctttctggttatgtagtgcattcatcgttgaatcaaacgagccaccgggtaaaccaaaaatatggtcaattccccagtctgccatgacttttaacattgcatctgatgcgtttattttctgtgctaccattaataaagacctcctgatgattttatgttccacttacttaagtataccgcttaaaatgtaagcgttacaaataatatgtctttttttaattattgggactggtaaaaaaaaccattttttggtatgcttgcactgagctagataataatgattataaataactaactttaaatttttatttggaggttctgaacatggcaattacacccacagatgcacaagacgtttttaaagatgctggcgagaacatcattttcgtcacccagaaattgaatcggcaagatgccgaggcggacaaagcggctgttaccgaattagcagcgcgcattccagcgatcatcaatagcatgaatatccgttacccagatgcccacttacgcgtggctttcgggattggctcggatgcttgggattacttattccctaacgcaccaaaaccaaaggaattggaacccttcaaggcaattccaagccctaaacatgatgccgtcgcaaccggaggcgatcttttcttccatattcgggccaaagaaatggcggtttgttatgaagtattagatcaaatgatgcaattcatttctgataacgcaacaacgattgatgaaacacacggattccgttacttcgaaggccgcgcgatcatcggcttcattgacggtacggaaaatcccgctatcgatgaaactgctgaatacgcattagtcggcgatgaagatccagaattcatcaacggttcatacgcttttgcacagaaatatatccatgccatggacagctggaaccatacttcaactgaagaacaagaaaaaacaattggccgcaaaaagttttctgacttagaacttgctgacgccgaaaagccaaccaacgcgcacaacgttgtctcacaagataacgaaggcggtgtggaacataagattgttcgcatgaacgttccatacgcaaaccctggcgaaaaaatgaccggtacttactttatcggctattctcgaacatggtcagtgacaaaacgcatgttaaccaacatgttcgtcggcaaaccagccggcaattatgaccacctactcgacttcagtgaaccaacaactggtgccctattcttcatcccatcaaaaacaacactagcaaaaatagcagaagaagaactatagagtgctgactcaaacgggttagactttgaggattaacagcattattttctgagcatccaattaaccaaattgggtgcttttcttttactttttaagcctgttaattgacttaacaaccatttgattggtacactacacttactaataataagaaaatgaggctattcatatgtcagaaacaatgcacgctattgccatccaacaatatggtgacgaaaaccaacttgaaatgattactttaccaatgcctacaattggtgaacaccaagtcctaattcaatctaaagcgacagcaatcaacccactcgactggaaattacgtgaaggtcatctcacaagcatgttccaatgggaattcccaatcgttcttggctgggacctttccggggtcgttgttgccgttggatcagccgtaacagaatggcacgttggtgatgaagttttcgcacgacctgccacttcaaatcgtggtacttatgctgaatacgttgccgttgatgacaacttaatcgcaccaaaaccagccaatgtcacttttgaagaagcggctgccgtcccattagctggcgaaactgcttggcaagcactctttaaccacggtcacctacaaccaggcgaaaccgtcctggtccaagctggttcaggtggcgtaggttcatatgctatccaattcgcaaaagcaatgggcgcccacgttatcaccacaactagtgcgaagaacttcgatcttgtccgtgaacttggcgctgatgaaatcattgactatcgaactgaaaaagtggccgataaagcccacaatgtcgatctcgttatcgacactatcgggggtcaaggacaagtcgatgcatgggctgtcctcaatcctgaaacaggtcgccaaatttcaatcgttggtgaagcgcctgaaactgcggccatcattaaagataccaatatgactttcaaagccatctggttaatgcctgatggtgatcaacttaaaaagattgccgcattaatggccgatggtaaagtcaaatcaattatcgatactgtcttcccattttctgctgatggcttgatcaaagcccatcaactaagtgctacgaatcactcaaccgggaaagttgttattaaattctagatctcccaaaaaacaccgctaacctaataggctagcggtgtttttttaatcattgaataattgatcactttctttgtcggtacgattcccaatcgtataaatttcgaccattacgaaaattaattcgatgggtgggaagaaataaatagcgactaatagaatcacttgaatcacccagaaataaggtttagtaatcgtgctatagatcggcatggctttaattttttgataccgctcaggggcgacttcacgattggcgttcgctaatgcatcactcaagaagaagtaggctaataaccaaatcaggtgaaccacgtagtaaaaatattccggaccgcgttcattgatgaaccgccccgtccaagccgttgcaacgggtaaaaatgacatggataataaccaaatattattcagccaataaatacgctttgttcctcgtttcgtcagcgaaaacatatagtaatgattataccaagcaacccctacgaaaacgtacgtaatgatatacgcaaaaaagtagggaccattttccaaaagtaccttaatttccggtgtttctggcgttttaaattccaagatcataatggtgacaataatcgcgatgacagcatcgctaaatgcttctaatcgacccttattcattctatacatccccttaaccaaaatagctaattttatattttacactatttaattatgatgtgctattatttatagaatgcctgatgtaccagtgcattcaacaactaatccccaacaatcctttcaaagatacttaaaaataaattgatttcagccattaattaatagtataatttatctacgtagtaagggaggaattatcatggaaagagagtatcaatcacgcgcttcacttaaaaaagaagttaagtcattatttgctggtcattggggaaaggccgttacgttgaacatcatccccactctgctatcaattattggggtgattattgtcggagcagtcttgatggccatgattgccatcttcgcaaacaccgacccatcaatggctgccaatgaatctttttcgggccattcgtctggtagtagttttactggtcaaattccaagtttcattttggggctcattacacttgggattaattttactttcttagattggctccgttcgaaagatgctgattttagttcactcaaaggagctttcagtgtcttctcaaaacgttatttcttgggcgcttttctaattcgaattttagctagcttatttacattcctttgggcattgttattcattattccggggatcattaaaggctacgcttattctcaagcttcttatatcttcaaggacttaacagataacgatccacaagctgacgttagctttttagattgtatcactaagagtcgtgagttaatgaatgggcataaattccggtttttcgtcttacaactaagcttcttaggttgggatattttagctggcctctcacttggcattggctatttctggttaacgccatataagaatgcaacttatatggcattctacaaagatcttgcaggcgatcaatttttacagacaacttctgcagatgaaccaactgaagaagttactgttgaagcaatttaaatgaactcaagacgttcttaattgggcgtctttttttgtattatgcggtgattagcagtaggcttagactaaccattttattcagaaaggatgacgtcatcatgaccactaatcaccaaatccaacttgataccgaacataattggcacgcagtgtctggtgaaatccctacgcctaaacctgaagagctactgatcaaagtcagggcaagtagcgtcaaccctgtcgaccttaaaagacgagctagcaccacaaccattttaggctatgacgggtatggtaccgtgcaagcggtcggcgccactgtgaccaactttcaacctggcgatgttgtcttctatgccggcagtacccagatcgatggcagtttccaacactatcaatgtgttccggccgcgatttgtgcgcttgcgcctagtacaatcagtgccgcggagattgccggcttaccgcttgtttcgttaaccgcctatgaattactttttgaaaagcttggttttaccgctgaacaaaatgccaatcgtggcaaacaactattgattatcaatggtgccggtggggttggatcaattctcagtcaactcgccaagtgggccggattcaccgtcactgccacaagcagtctcactcatttcgactggctaaaaacaaacggagttgatcacccgctggattatcattcacctagcagcttagacaacttagccagtcttccggataacacctttgatgccatcgcggtcctttatgatattgaaagctatctccaagaggtcgcacggctgattaaaccgtttggacaagtcggtacgattgttagcaatacgcatccacttgatctcgcactgcttaagcctaaatcagcctcattttcatttgagtacatgttcactaaaacggactatcaattccaaaccactagtcaaggggcgattctccaacaaattgcgcggctaatcgatgcgcggattctgcatccaatcaccaccgcccactacacaggcttaacggtcgctaatctccaaatgattactgataaactgttaactggccatacgactggtaaacagggattggtctactaaacgcaaaaaagccgcaaccaaattggttgcggcttttttaacacaacagtcatcgagttgcggggattgaacccacatcaatcattcattttacgcttcgcttttaatagccaatcgcttttgattttcttgggaggaatttcaatttagatgattggttctaccgttaaactacaactcattgggtgttgctaagacacttctttagggaggaattgtctcataaaattaacttgctcagattcacttacttgggagatgcttatctgatatttatagaataccaagcagttgggaccaaattgtgaactttcaagtatgaaatgatgtccgttaaaaaaagccccaccactttggtgagggctcaattttatagctcatcttccgtcgccaacaaaccatacttcactttaaagcgactgatgattcggtaccacgactgataaaagaagaaaataaaaaaaacatttgataaagcatgggccaagtcaaaatagaaactcgcgacataggctgcaataaaagtcttaatcgtcagtggattgacgtatgcgacaaaataccacagattcataatccacccaaaaataaagccccagacaaacccaaaaatacagagcaagtatttattctgtgcccactgatggcgactaattaagcctgccgtaacgcccatcatgccccagcaaaacatttgccatggggtccatggcccttgtcccaaaaacatattcgagacaatcgcggcggtcgaaccgacaataaaacccgattctggaccaaggactaatgccgacacgataatcacaaaactagttggctgaacactgggcaatggtgcaaatggtacccgagtgactgccgcaatcgccgctaaaaccgcgatgaaaataatttcacgggcgcgaatatcccgggtttcaaaccgccaataaaatggcagcatactggcaatcaaacagataaaactgaagatcagaaaatgctgtccttttaaagtgacgataaacaacatgaaaatcgccataatcaagaaagccaatccaaacgtggtccaactattttttaaagctttcatgcgtgcacctcttcccaattcagggcttcgggcaattgactgcgtaacattcggttgatggttgtcgtatagaagaagttatgcgcgaaaaaggcataaggttcttcctccgatacaatcgtcccatcgaataataaggcacactgactagcaaaccgggcactaaaggccatatcgtgacttgccataatcaacgttaagccttccgcttgtaaacgcgttaacaattcacccaacgcccgtttgcgaatcggatcaaggccctttgttggctcatccaacaagagtaactgcggctgcgctagcaatacaatcccgagtgcaatcaattgttgctcgccgccactggcatcttgcgggttacgttcagcaagggtttgaagaccgagctttgctagcatctcttctgccacttgttctggtgttacgcgttttaactgccgcgcccgttcgataaattcttgacggacactatcataactgaaatgatcgctcggtgtttgtgagagataacccactgttttgaaaagttcagcttgcgcccacttaccgatcttcttcccctgtaacttgattgcaccatggcgcggttgtaataaaccaatcaaaagcttcaacaacgtcgatttaccagtcccatttttaccaacaatcgctaaccaatcgccggtatgaacctctagattgagctgatctaaaacataagggtcatttttttcatactgaaagctcacatgtttggcctgcagaattgttacttggtcgttcgtggctattttacgtttagcatgcgttaactgccattgttgccgctcaatcaattgcttcccactgacaacggtcaatggtaatgccgcaatatcagccggtgcaatcaactcattttgtaaaaagacgtgtggcacatctgggacgaattcacgcaatgccggttgcgcccaaattgctgctaatccaccagcaaccggtccttgatacgttatctcaccgccatccatcaaccaaagttgattagagagcggtaaaatatcatccaactggtgttcactgataatcacggtgatgccgagttcgtcatgtacccgttgcaataaactaataaattctttggtcgcaatggggtcgagttgcgctgttggttcatccaacagtaaaagatctggctgtaaaatcaaaaccgacgctaggttgaccagttgtttttggccacccgataaatcatgcacggaagcatacagcaaatcttggaaacctaaaaagctgactaattcggcaattcgtttttgaatatttgcactcttttcaccaatattctcgagtgaaaaagcgagttcctgaatgaccgtatccatcactaattggttatccggattttgaaagaccatcccaatcttctgcgcacttaacccttgcgataaatcagctaacggttggccctcgaaaataatctcacccgaccgtttaccaacgggccagagttcttttttgagttggcgcaataaggtggtcttcccgctacccgagttcccagctaacgtaatgaagtcacccgtctgaacggttaaattaatgtctttcagattttgttgggttgctaatgcatactgaaaattaaattgttttatttgcgcaatgtccaccataaatattcccatccttctagtaatagcggcaaactatcaattaataagactaacactaaacatagccaaccaatttgattcaaatgaatcgagccaagtattggataaatcgctaagcggccaatcccctgtttagcaaaataaaaacaaagtgcactgcctgctacaagacttgccaatacccaaccatcccgttgggtaaatcgataacgttgataactcgttcgcttctgtgacccataaccacgggccgtcattgaatcagccgtttgtagtgcgtcaaccaatgaattaatcaataatacttccatcaaacgcatcccggcatgtgatcgggctctaacactccccgtttccatctgcacaccacgtgttctttggacattcttgatattggtaaaccgccgaataaatagtgggacaaaccgcatcgtaatcatcgttaataaagttagttgcggtgaaatccgcacaaataaatataagaacttatgattcgtcatactctgattataggaaacaaacactagcattaagatcgccagcgaaagcgccattaaaaaaccgtacatgacagcctctgctgtgatcaccgtcccaccaaacgtcgcaatcacgtgcgccccatgattattcataataggattcatcacgacgataaagagcatcatgaacaatgcaccctgcaatgtccccagtgttttcttctggtttttcgcaagcaagttcactgcaatcatcatcaacaattcacttacaagaaaaatcggatgaataaaaaccattgagaacgcaattgcaatcacgtaatacgcaaagatgacgattggatttaattgatcaaagaccagttgcgattttaaccctgaggcgcgttgcgatcgttcccgagattttccgtatacatccaatcaatcacatctccactcttaacaggataattaccacaagaatagttaggaaaactgccattcactcgataaagccatccgcttaacggtcctttatcaaattcgaatagcccattaatgcctttgatatagacgccgccgcccgtcccacgataggatagtgccatcccgcgactttgcaaatcacgttttaaaacatcaatcaccatatccccatccttgatttcaacttgatcaccgttcaaccatttcggattaccttcactaattggtccataaacattgacgctcaccttttcaaggactggttggggcgtcgtagtgggcggtgtaactggtttactttcagttgattgtgacgattgattaatggcggattgggtcgatgccgattggactgccgagccttgttctacagcttgttgcgatgctaattgtttgctagaggccgatttttgtgatgattcatttgtctgttcagattgactgctggacttgcgcgtttcagctgttttccgactttcagataccgccctactatgtgactcagaggccttagatttaactttaccatctaaaccaacagttgctggcttgacccgtttttttgatctatgttcctctttaacatgttgactacgcgtagacggattatcttgagccacactttgataggtaccgtatccgatgccgcttaaaataactaaactaccgataatcgcaatgattctctttttagacatatctaactcctaacgatgttcaacttgacgcttgaaccaaatgccaataatcccagtcaaaagtatcaagccggctacagaagcaactactgttgagttaacacccgtttgtggtaattgcttttgctttatttgagcatgatcttgattgtctgcttggtgtttattttctttttcaaccgtagtcacttgtcgttcaaacttgaaactgattgtattattcgctgcattaatcgtgatggatttggttggcgtgtcttttaattgataaccctcaactgcaacatcagatgcattaatcaacattgtgcgtccaactctttgatgctgcaattgaattgttttaaacactttgccgttttgatcgactgcttgcaccgtaacgtcagcaaactgcgctgcaggaattgtcccaatcatttgtttccgatactggaacgtcacggtcgttcccgttttagcaacttgaacagtttgttgtgcattgcctaataattcataaccctcaactgcgacttgattagcattcaccgtaatggtttgaccaacgggttgttcagctaattgaagactctttaaaatttgtcccttttcatcaactgcttggacctttaccgatgctttttcaataactggcgttttaaaatcataaattgagccttttcccgcttggaacaaccggtattgggctaacgtataaacggcttgttcagttgacatcgctagcgatcccatatcgttattaatattccagcggaactgtccatctgctctttgataagcgaccagccgtgaaatcgggttagcgccttgatcgccaacaaatgttgtgactggatcaactccagctgcaattaagcccatgacaaccattgccgtactatttgagttttcttctgtcatataaacactagggattaaaaaaccacccgtttgtgcaacaaatgttttttctttcaacatcgttaccgctttatctagcgcatcttgaacgcctgggaagtcacgatgcatccccaacgccgtcatcgtcatcccggtcgtatctaaatcacttttactaccgaaaaaagcccagccattttcagcgttttgtgcttgtaaaaccgttggaattaaactatcaatcgcttgctgtgccttggcaccataatcacgcatgctaagggcgatgatgccgtaaacttgcccgttgatcccaccagttggtgctttttcaataattttatcaattatatttaaaccagcgaagttggttgcatcttcaccaagtgctgttaccccaattaccaacacttctaaatcggttgccgaaaaacgttgatcagcgagcattgattgtgcatccgcaaccaaggcattatgataactcaagcgttgcgctgcactcagtgtcacgcctgattgaatagctgctaacgctgaccatgcatctggttggccattattcaccaactgttgcgccccagccaccattgctttttgataatccgtactagatgcagtacgtggtgtcacttgtgtaacctttgtctcactcgcagacaccgtttgtgcactaccaataactgaaacaacaggcattattaacattaatcctgtccataataaggtaaaaaattgttgtcgcttcttcatttaactctcctcattccgattaactttgataccctataatttaccatatttaggagctagaaagttggccctataaggttaatcttcacaaatacgccttaaaaaaaacttcatttcaaacacaatttattcatatttaccgcctaaactaatatttattcagttttaaggaggaaatacttatgaattttatcaagcgtgcttggcaaaacgtcatctttaaaaaagggcgtagcttcttattaataattgtgatgaccgtcatcatgatttttatcatggctggtctattgattagaaatgcagccattacaaccgtcaacaataccaaacaacaggtgggcgctagcgtcaccctttctgcaaatcgcgatcaagcgtttaagaaaatgcgcgcctcggctagcagtgatgccccaagtactacagcaacgcgccctaaattaaccatgccctccgtcaaattaaaagacgtaacggctatttcgaaattatccgggctggcaaattataacgtcagcgtcacgacttctgcgaacgcctcgtccattaaagccattacgacatcaagtagttcaagtaatagtggtggcatgatgggcggcggccctggcggcaacgctgagtcatccacttcaacaggtgacttacaaatcaccggagtgctcaataccgcaaccctcagcgactttaaagataatacaagtaaaatcacgaaaggtcgcgctttaaatagtagcgacaaaaacaccagtaatgtcgtcatcgaatctgaattggctaaagaaaacagcctcaaagtcggcgacaccattaaagtcaaagccagcacgacaggcaaaaaagcctatacgctaaaagtagtcgggatctataagactagtcaaagtagcggtggcatgggtccacaacaaacagaccccgcaaacgtcatctatacggcatacacattagctaaccaaattaaaggtcaaactggcaaagtggatagtgccacattcacgcttagtgacccaactaagaaaaatagttttgtaaaagcagcgaagaagattatcaatacgaagaaattcacggtaacagctgatgacagtacttaccaatcactcaaacaatccatgcagaaaatggccagttttgctaataagattgtttggttagtcgctatcgctggcactgttatcctcgcattaattattatcttaatggttcgcgaacggcgttatgaaatgggcgttttactctcattaggtgaaaagcgcgtcaaaatcgtgggccaattattagttgaaatgttcatgctgctgattgtcagtttagctttagccggcattggcggacgattcgctggtcaagcgcttagcaaacaagttatgcgttccgtcacaaccgaaacgacaaccagctcacaaacaaataacatgcaacctggcggtaacggcggccctggtggcggtcaagcccctagtgggcaaactggtggcaatcggccaagtggtcaaatgcaacaacctggccaatctgctaaaaaagccgtcaaagcaagcgaccttgatctgaagattagtgccgtcaccttaatgcaacttggcgcattcggcttcaccatcatcgcatttgccgtcttactcgcatcactcaatattttacgactcgagccacgcaaaattctcattggataattataggaggtccactatgttaacagctaaaaacgtcagttactggtacgatactgaagaaaatacactttacaaagatgttaatctcgattttgaagccggcaaactttacggcatcatcggtagcagtggtgctggaaaaacgaccttactcaccatgctttcagggttagataaaccgcgccgcgggagtattttatacgaaggtaccgatatccaaaaaatcggcttaacccaataccgcaatcgctatgtgtccatcgtgttccaagcctacaacttactcccctacatgtcggcactcgacaacgtcttgactgcgatggccattactcattcgacgcatgaaagtgccgccgatttcgcactcgaaatgctcagcaaggttggcatcaatcccgaactcgcccataagaacgtacaaaaactatcaggtggccagcaacaacgcgttgcgatcgtgcgcgctatgtgctgttcagcccccatcgttgttgccgacgaaccaaccggtaacttagatgaacaaaatacgcaggagatcattcatctcttccaagaattagcccatcaacaacaaaaatgtgtgattcttgtcacccatgaaaaagaagtcgcagcaagttgtgatgttcagtatcatcttcaaaataaaacctttcaaccagttgcttaactaagtaaaaaacgactgagcctgtttacggcttggtcgttttttaacgggcatgctatactgagggcaatcaaaaggagggcttctaaatgctaacaatcttctatggttcttttagccatgctggccaatcatttattattgcagcaacccccaaaggtatctgttttgttggttcacccgatggcactatcagtgaactaaccacttttcttccccaaacgaaattagttgcaaatcaagctgcaatcgctccttatagtgaatcattaacagcttatctcgatggtgaccaaaccacgtggtcactgccaattgatattatcggcggcacaccttttcaaagaagtgtttgggtcgccctacaagctgtgccatatggtcaaaccacaacttacagcgctttggcagctcaagtcgggcaccccaccgcaattcgcgcagtggcttctgccattggtcgcaatccactattaatgattattccttgccatcgcgtctaccgtaaagacgggcaaattggggggtatcgtggcggacttgaattgaaacaaaccctccaccagcttgaaactcaaaccaaataaggggattaatttgaaattttatcaataaaagtctatacttattattaagtcggtggtagaatgtacggttactctacccctttcaaattaagaaaaagagatgattattacgcaagtaactgatgtttatgggttaacccacgaaaactgcaagctgatcgaaactgaaaatgattttactcgcatcttcctagctgaaggtcctgatggtacacgttatacgtgtttactacctgatgcgaaacccaatccaaagtcaaaccaacactttgaatatggtaatccagcagatgcaccatactagatactaaaaaagcgccaacggatattagaatccgttgacgcttttttgttgaaacgtgttctcgccagcatatttctgcacttaaccaaatttaccaaatcagcgattacatcgccaatttggtaaatccagtcaatgctcagcactctattctgccattaatatatccaagaattgttcgccgtatttttctagtttattttcgccgacccctttgacatctagcatttcagtcaaggaagttggcatgatttcacacattgaatatagggtcttatccgagaaaatcacaaacggaggcacaccttgttcttccgctaaatcgcggcgtaactcacgtagttgttcaaataattcattatcttcaggcaacgttttttgcactttgaccgccatcttgcgcgtcactttcgcttggccttttaagactgcaactcccgccgccgtgatttgcagcactgggtattgaccgccagaagcttgcaaatatcctgaagcgactaagtaatcgatcaaaccactgatttctttttgcgaatcaccacgcattagaccatacgttgggagttcatcaaagcggaattgcatgattttttgattcttcgagcccgtcaatacttgcgccaccaacactttgccaaaccgttcatccatccgtttaacgcacgataagactttttgtacatcaatcgtgatgtcttgttcttcacgcgtatccagacagttactgcaccggccgcacgcttcacaatcatcatcaaaataattgacgatgtactgttgcaaacattgctgcgtattggcgtactgcgtcatttcttgcaacttggcatattcttgttgcttatgcgcttcgtccatttccgactgatcgataaagaaatgctgaatctgcacatcattcactttaaataatagaatcgcttcactcggcaagccatcacgcccggcccggccagcttcttgatagtaagcctctaaactcccaggaatctgggcatgcacgacaaagcgcacattacttttatcaatgcccatgccaaacgcattagtcgcgaccattatcggtttgcgatcatagagaaaatcctcttgattctgacgacgcaccgcttcgtttaatccgccatgatacattgtcacatctaacttagccttttcaatcagcttcgtgagccgttcaacttctttccgtgtgctggcgtaaataatcccggatttttgtttgttgacctttaaataatcgattaagtagcgatcactattttgatttttaactacttgaaacgcaagattctgccgtgaaaaccccgtcttaacttcgtgctgaatgttcaaccgttgcatgatgtcagctgccacttgtgaggttgccgtagcggttaaagccacaatcgttggtcgttggcgcatactctgaatcgtatccgtcaggcgtagataacttggccgaaaatcgtggccccattgcgaaatacaatgcgcttcatcgaccgcaatcaaatcaatcgttaattcagctaaatcagctaaaaagtaatccgaatccaagcgttccggcgaaacatatagtaatttcacttcaccacgcgcagcttggttaaagcgttcttggacttccccctgcgttagcgtactattgataaacgtggctggaatcccattttcattaagcgcatcgacttgatccttcatcaaagaaatcaacggtgataccaccaacgttaaaccggttagcatcaatgctggtatttgataacacaatgacttcccgccaccagttggcataatcgccaagacattagtgcctgccaacaatgattcgatcacatctgcttgaccttctctaaagtgatcataaccaaatttttcttttagtaccgcttgtgcttgcatgccatttctcccacccgttaaaattcctaccttctatcataacaaagattcgttaattccggttaattgaatctcagtttcaagcattccttcaatcaattcttactggctgacaaaaccagcgatttagtgtttaattagaagcatcaaagactgtcaggaggcttcctatgaccttggaaattaatgcaacattaacggctacccaaacgatcgtcgatttaatcgaacaacccgttactcagcttttaattgaacaaacaccggctaatacaaccgcattcgcacaccccgctttattcctcggttttgcgcagcaacaactgcaacaaattgaacaactctccccacttgaaacagcctcgactgatcaagttgacacgggtatctggattaccatggatcctgagtggactgaacaaattggctacgtagggcagctattagccgaacaaaatcaaccaccgataacgagcacctcgcttccgtccaacgtctctcaaaatttccgaacaaccttagctccagccgttgaagccatcatcttggtcctcagccgctttggttatcccctgaccaaaagcgtaccagtcaaagcaaaaccggctaaaacacgtcatcgatggacaaaagccgtcagccaaatcgaattcactgttgctacgcgcgaagcacaaggaacagccatctggcaaaagcgcaaagagatgttattgaaagcgggggcacaattatggccaaccgcgtcacttaataaggatggctcgtttggctttgctgctaaaatgggcactcacttgcgcaacgaacatgcagcgcaaattcaagacaatcaaacgactgaagacattattttcaagagcgtgaatgaaatcggcctcttcttgtactttggtggcaccaatagttggctcgaactatgcgacacaaatggtcgctcaattgacgactggactaaaatctaaaatagaaaagagattcaacatgcaaattatcagttctggcattcatcacggctacttcgacgacctctacggcggtcatggcactcaatttaacgcggaaggtgtgccaacttattccattccgtttaacattcaagacgcacctagcgatacagtcagttatgctgccgttttctacgatctagatgcctacgaagtgacgcaagggtttccttggattcactggacacttgccaatttaaaaacgaccactgtcgcggctaatgctagccaacaagcgcccgatttcatccaaggtgttaatacttggcacagtcccaaaacagaccatttatcaacagaagcaagtgcttgctacggcgggatgacaccccctaaccgcgatcacacttatacacttaaagtatttgcacttgataccacgctcgatttacagcctggcttttacctaaatcaaatgacagcggcaatgcgcggtcacatcttagatagcgctattttagaagcacaataccgccaatttaaacattaggtgacaatggccttaactcggctaacacttttgtcatctgatcttaaaatcgtcgcttttttacgcttaacatcgtatgataactttatcaattcggaataaggagttctcattcaatgaaaaaaaacaattagcattattgcgataatcgccctcatcatcgtcggatttgctggctaccgttaatacaaaaatacgtatgtcggcgaagtaggctacgccaaagttgctgctcaatctccagctaaagaagccaccaaagatgattcaggtaaaacagtgactaatatgtatagctatcactaccaactaaatgtggtgaaagaagatggtagccaccaagtggtccctgtcgaagttactggcgaaaatccaacgccactcactcccaacagctatgtcaaagttgaatttaattcaaaacgcgtcttaaaagggcctaatactgtgtccaagaatcaaattccggctaaagttctggcgggtttagataaataataaattagcttatcctagtaccattaatacttgttattagctgttaccctcttaaattaagttattaaaaagcagtacccttgattagttatcatgggtgctgctttttgtatgtttcctgtgaaacattttgttttgtttgattttctttaaggcttcacgttgggcgaagattgttagttcgtgttcttcaacaaacgtcatcacccactcaggattttccttactatagttacgtaaagcccagccaattgctttttggataaagaactcatctgtgtcaatatctgccagaatggcttcttccaaaaacgccacattcgttttttcgtaaaaactgagttgtagcgtaatcgcaatccggcgcagccagaaattctcagcacctataaaatgctgtgcaacccaatcaaactgttcaggatgcagtctgatgtactctccaaatacttttcgccaagcatcgatgctgtcccaccaaactttttccaacaccaacgttaataaatgttccatatcagccggttcccaccaacgtactgaacgcaatgccatctcgatggcaacatattgatactcacgcgttggttgagcatataaagtctcaatgaactgcattatttctgctggtgacaattgtttcacagactgccacaattcgcgttcaattaaatggcggtccggtgctttaacaccgttaaattcaaattgactctgcatgtatttcttcattgccgcctgattttctggatatatcggtaattcaaaatccatggttatccctccactatatcgcctctaaaaaacttgtgccgtttgtttagctgtttcaatagcttcctgcatgatcacgttagctttttctggcgaatgatcaattccttcaatattaattttaatgacttcgtcaacaccggcaaagccaaggattgttttaatgtattgtgttgcaaaatcttggccagcataaacgcttccggctgactgaatatgaactgctttttttccagttactaagggctgcggagctgtttcagtatgtctaaatgtttttccagccaccatcactgtgtcaatccacgctttaagtttcgtcggtacatttaaattccaaagcggattaacaatcacaaacttatcggttgctaagaactggtcggtatagcgattaaaccgagcgaccttctcttgctgactagcgcttaaggtggccatagcttgcccttcttttaacgccgcccatgccgtcattagttcttgatcaatttctggtaagtcagattggtacaagtccaaccaactgatttcatcagctggattttgtttttgataaacttgcatgaactgcgccaaaatcgttaacgtccgtgactgttctgtagcaagtggatgcgctttaacaactaatactttactcattaatttccgccccttagtatttaaactttatacactatcattttagtatactatctgcggcgctgtccataagctttacatcatttaataaaccaaccacctattaatgaccttttacaacgttttatacagcaacaaacaaccaaaaacgattaataagtcataaatataccgcaccatcgttcgactatcaattcgagtgctcacccaattgcccagcggaatcacaactaacaataatggtaagctaagtcccaatagttgcaatacttggatggtccaaaagcccgctagaatatgactgattacaacgattgtcccaacacaaataaaatgggcctgtagaatgccccttaacgatgctactggccatttttttaatgtcccataaatcaccaccggcacaccatgactattgtaggcactgcccatcatgcctgatattatcccagctaaataatcccaatgatgtgactgtaaatgttgctgctgcacgtgatgtcggtgtaactgatagcgattatagctgccataaaggattaaaaacccagctaacgttctcaacacaatcgtcgttggcacatacgtcatcagcgctatcccgactggcacacccaataatgaaccaatcactagtcgtctgacaaccgctatatcaatctgttggcggtggcgaatcacagccggaatcgccacaattagtcccagcgcgccaatcaaagccgttgccgcttttaaatcaatcgctattagggccaataatggcatcgttactaatgcctcgccaaacccaaaaaccgttctggtaaaagcgcccaacgcaacgatcaaaagaatcataattattgtcatccagaaatccttcctaaaccgttttgttccacacaaccttttcaaactgcgtgcctttactttttagtacggatagacttgcattagcaaccattttttgtgatcgaatttcctcaaacggaatccctagtagtgtgttgataacaaacaataaaataatcccatgcgcaacaactaatacatcaccatcaggatacgccgtttgagcagtcttaatcgcgagcatcccacgttctaagaccgcctggtaggactccgcgtgaatctgtttggcatcaaacagctctggatgatggaagtaattttcatattgtggatggttcgtcaaactagcaccaggttggccttcccaatcaccaagtgccatttcttttaaatcatccacgaccatgattgccggttgtgattgattagtctgcgacactatcgcatccattgtttcaacggcacgtgttaatggtgacgtcagtaacgcatcaaaagactggtccgctaataaactacctagtcgtttagcagccgcttgccccgcctcagttaatgttgaattcgtcccaccaccattgaaacactgtactcgattaaccatcgtttcaccatgccgtacaaaataaaaagttgtcatgttgatcccacctttataggatctatcatactataaaatgcaaaaaaagacgcagtttaaattgaactgcgccttcattgagcctcgttttattcaccttccggcgtgttttctgccacgacttggtcataggcctttgtaccagcatagacttcgtcagttaggatgttgcgtttatacttcatgacacgataaatgtggagaattaagactgccacattaatgaccagtgctaaaccactgattgtcatcaaagcagcactactgtgcgtaccttgcactgaaaattgtgaatccgttacaaaagcgggataactcattgtaaacatcatccaaaaagccaatgtttgcgcacgtgcttggagccagctcccttttttaaccaggaatgctgctaatgtacatgaaattaataatgcagcgcccgcatagaatgagtgatcaccaacacaattgtaaacataggcgaagttccaaacatcataggcgataatccaaggccagatttgatcgggccagatcatgtctttttgtttgtcatgactgataataatgccaaaccagcctgagattgtgatgatgttaataatcccggcagccccattcatgatgttccacgcgccaccattcatgatcacgccgtcgactaagccatgtaggtgtgaaacttgaaaatcacgaatcacagcttccataatattaaacgctaaaattgcgggtgggaaaatcaatgcccacttgttatgttgtaacttagggataaagcgcagcgccataaaccctaaacaacctgctaatgctgagtacactttaacccagtggaaccaagtcccggtactgctaccaggaccagccgtcgttggccaaacaaagagcgttaaaacgactggcaacccaacaaagagaattaatccaatccacttgttagcccgagctgcttcatttaaaaccattaatgcaataaccactagtccccaaactagccaatccattcctgaaatattttgaaataaaaacatatcagtcacctccaaagaaataattgctaattacattcttactttaactgcaagctggcggtttctgtatggtcaattcaggataaatgtccaaatctaatgattattttgtaaaacatggttcacagtaccatttaacatgcgatgcatgcgctgataaaattcctttttagattcttgtagatttgttacaagccattgcgtaatctgtgtcgccaatgcccaaccataaaattggcaatttcatctcggaaagtcgctggacaatccacctttaaatcttgaacaacccctgcaaccatgttaaaagcaactcgatacaaaaaacgacttagtaaatctcgattaagtgaatgaaacgtatttaaacagaaatgccgattgttttcaatataagttaccaagacacctagaccgacgacccaatcccgttcacgttgatacactgccagttgcgtaacaatttcacgattataaatccaagcaaccaactcattaatatcggcgaaatggtaataaaacgtattgcgcgcaacgtcagcactgctcgtcaattgattgaccgtaatgtgatcgaccggagttgttttcatcaattcttttaaggtatctgctagcttttgcttggtatccatcgtattgccctccaaaaattatctatgattagcatcccatagatagttccgaactgcaatcactaacccgatttgcactccaggataaattgttctatcgttagagagtacaattaacggaggcgacttataatatgcacgaaactgacgacgcttttagggcgatgaccaatggggaatggtactttgattcagcggtcactattcaaaaacgggatgcagcccgccttgccttacaaaaggccagccaaatcttagataacgatgcacggatggccactatccaaaaattactcggtcataccggtagcgattttttcatcgaaaccggttttgaatttagcttcggtgaaaacattacgattggcgatcatttttacgccaatcgtaacgtcgttatttgtgacgaagcaccagtcaccattggtgactactgtaaatttggcccaggagtatcactcttaaccccttaccacccaattgaccccttagaacgtgcgacaaaaaaagaaatttctagtcccattactatcggcaatcacgtctggctcggtgcaaatgtcacaattctgccaggaatcacgctcggcaataacgttgtcgttggtgccggcagtgtcgtgaccaaatcctatccgggtaacgtaattttagttggtaatccagcacgggtattacggaaaattcccgctaaataatcaaaaaggactgacaaatgtcagtccttttttaggcttcaattgcataatattcaataatcgtttgtaaagcctccgctgcgcgttgatctccaattaacttagtgtagtatgctgtaaatcgttcatctgctacatacatggctgctaaaccgcggtgcattgctagactataccggggagtcgctgtttgtaaccacgtttgatgggcttcaaaggctgtttgcgccgcttctgatggcaattgcggctggtccaagtaagtttgtaatgccgtcttcaatcggtcttcagccgcctgcatcgttgcatattgggcctcacttagccctaaaaagtgctgatcggcttcttgcttggcttgtttcccatagttagtcgtcacttcttgcccgtagcgttgctcattttcagccactgcctgttgtttaaactgtttgaatttagtttgatctgtcatttgaattcctccggtttgattttgaagggtcgcatctagctgtgctaacgttgccgttagcgcagcttgttgtttaaccagttgttcccgctgatttgctaagcgttccagacgctcggccggtggtaacgccaacagctgctgaatctcagccagactaaactgtagttgacggtacattaagattaactgcagtcgatctgcatcctggctcgaatacgttcgataaccattactagcaaccgttggcaccagtaaaccgcgctcgtgataataacgtagcgtacgctcagaaaccccggtcaattcagcgaaagttttaatctgataatccatttgccttccctccttcaaaacccactataaggcctgacgtgacgtgaaggtcaagcattgttcgttagtgcctgattaatttctgtttaaccaagtaatcatgggctacatcgcgtgctttgcggtgtttgacctgtacttggtagttcatctcttgcatttggctctcagtaatctgacctgccaagcgattcaatgctttgacgacttccggatgcgccttggcaaagccggctttcataatcggtgccccttgataaggcgggaagaagtgacgatcatcttctaaaacaactagtttgtaccgtgcgacttccgcatcggttgtataaccatcgaccacatcgaccttgccgtccgcaatcgctttatagcgaatacttggctccataattttagcatttaaatttaattgataggtgtcctttaacccttgatacccatctttttggtgataaaaatcaggatcaaaaccggccgtaaatggttgattcaaagcggctaaatccgaaattgttttgacattatatttcttggcaaaggccgcagtaaccgccaagtcataaccgttttgatagcgcattggcggtaagtacgccatattgaactgttcttgtagcgatgtttttgcaagttgatacgttttagttggattctggtttgtcttagttggcgacttcaccaacgtctgtaaaaccgttcctgtgaattcaggataaatatcaatcttatcagccttcaaggcgttaaataagaatgtggtcccaccgaaattaggtttaaccgttactttgtagttaggctgaccttctaaaattagatcacgatacatattcatcaagatttcgggttcactacccaatttcccagcaatcgtgatggtggtctgcggcgcttgaaaccgtgtcattccttcgatcacaccgaaaaggccaacaaaaatggctaaactgactgtgatttttttaaaggataatgtccctaaccagcgaattaatgcactgaccactaacgctaaaaccgctgaaagtgtcgctccaaccagtaatagtgcgttattatttgactgaatcccaacaagaataaacgtcccgaggccgcccgcaccaatcaaggccgccaaggtagctgtcccgataatcatcacgagtgcaatccgcaaacccgagataatcaacggcatcgcaagtggcagttcaatccgtagtagccgtttagcgcgcggcaacccgaaggctatttctgcctcttttaatgctggatcaattccgatcaaaccagtgtatgtattttgaaaaatcggcattaaggcataaagtactaacgtaatcacagccggaatcgtcccaattccgacaagcgggatcaataatcctaagagcgccaaagacggaattgtctgtaagacactcgtgacttgcagcattgcttcagctaatttctgatgagctgttaaaacaatcgccaacggaatcccgatagccgccgcaattaataacgccaataacgaaatctccaaatgttgcccaagtgcttgtagcaactcaccggattgggtcgttaaaatttgttcaatctgttgcatcatcgtcataccccccgtttcgcaatgagcgttgttaaatcggtcatcgtcaattgccgttgttcttgaccatcagtggcaactacgcccccatctggatggtctactaattgttgcgctaattcagctaatgttgcactggacgtaatcgttggcggctgattattaacaacagttcctaaatcggccgccaataaatcttgaactgtcaacgatgcttgttggcgttcaatgtcaaaaaattcgcgaacaaattcattttttggttgattaaaaatcgcttttgctgtcccgacttgctgaatactgccttggcgcattaccgcaatttcatcgcccaagcgcaacgcttctttcatatcgtgggtcacaaatacaattgtattatgcagctgcttttgtaaactcaaaacgagatcttgtaattgtgtacgggtcaccggatcaagtgcactaaagggttcatccatcaaaatcaccttaggactagttgctaacgcacgaataatcccaatccgctgctgctgtccccctgataattcacttggataacggctagcatactgatccggatctaaatggaccatttccaaaagttcgcgtgcccgtttttgacgatcagctttggtccatttcaatacctctaattgaatggtaatattttcctcaattgtgagatgtggaaacaacgcaatgttttgtagaacgtaaccaatattgagccgtaacgtttggagatccatttgattgatgggttggccgtcaatcttaattgtgccactcgtgggttcaattaaccgattaatcattttaaccgttgttgtctttccgctaccactcggtccaaccaaaacaaatagaccattgtctggaatggttaacgtcaagccatctaatgctaagctttgttcatattgcttagtgacaccttcaaattcaatcatgtgctactccttttgccggttaacgatttgttaccttattgtaccacttagcaatcagcccaccaattgacgtgcttaaacgcccaatccaatttttttgattcgctttgtgactatgctaagatgaacccgaattgaaatctgaggaggtcttaatatgcaaacacattttgatacaatcattattggtggcggtcctggcggcttagcggcggcttacagtctcgctgaacaacagtccgtcttagtcgttgaaaatgatttatggggcggcacttgccccaaccgtggctgtgatcctaaaaaaatgctttattcagctgtcgaagcactcgacaatcaacaagcactccaaataaatggcttagtcggaactagcgctattaactggtctgaactgatggcctttaagcgatcttatacgcaacaaatcccgactggtaccctcaacggtctacaacatgccggcatccaaaccgtcacgggcaccgcccacttcagtgatgctcaaaccttgcagattaatggtggcacttacactgccaaccatttcatcattgcgaccggtcaaacaccaacgctccctacaatcgagggtcacgatttactacaaaccagtaatgaatttttagacctcgatcgtttaccagaaaaggttgcctttattggtggcgggtatatcgccattgaactggcaaatattgcagttactgctggtgcagaagtccatattattcaacataacgagcgtattttacgcgacttccctgaagttttaacacataaactcgtcaccagtcttcaggaaaaaggcattcactttcattttgacactgacgtcacaacaattacgcaaaccagcaatcagctaactctcagtaatcaagctaatttcaaactgacagtcgacgccgcttttgccgcaatgggccgtaaacccaatatcgaccaactggcattggaaaaagctggggtaacagcgaaccagcatggcattcaagtcaatgaccatttaatgagtagtaatccccgcgtctttgccattggtgacgtcgtagatcgtgtccaacccaaattaacaccagttgctggttttgaaggccgctatgtcgccaatcaactactcgctaaaaagacagcacccattacttacccactcattccacatacggtatatgcaagcccacaaatatcacaagtaggcgtttctgttgcaactgcacaagctgctcctagtcaatatcgcattaatcaacaaaccgtcacaaattggtataccttcaatcgtattcaagaatccgacgcaatggtcatcaccatttttgacaatcaaactaaccaactcgtcggtgctgcggcttacaccacaattgctgaagaactcattaattactttaccaacctgattaaacatcagacaaccgcaacggaactcaccgataccatctataactacccaagcccggcgagtgatttaaaatattattattaaaaaaagtgttgagggccaacttactcacgaccttcaacactttttttaattttcttttttcgccttcatctgtaaccagatattaaacgcgagcacaatcaccaataggactgtcgcaatcagcatgatgttatgcaagccttggtacataatcgcgcgcatcgctggtaataagtgcgctggtaattcgtgaacgcgttggagattgcttaacttattcatcatcgccatcgtaatttgaccgtgcgattcggcaatgccgcgtgttaaggcatggtttaaaatcacaccgtaaatcgatgacatgaatgtttgactgagaattcgcaagagataggcaaacgacgtcgcaatgggaacatcacgttcttcggcatcttcttgaacattgatttgtaggacgttaaaactcatcccgagcccgaaaccttcaaaggcccccatcaacagtaagaaccaaaacgatgcttggtcgcccatcatcaacataccgctaaacgcaattaaaaacgcaactgttcccaatgtcacaacgcggtgtttacccaatttaggctgaattgcaggacccgccaatgagccaattaagttggtcaccgcacctggaatctgcgtcattccaccgagtagcgcacttaatccaagtaaaccttgcgcccacattggaatatagatattaaacgcgataaatgcgccccataaaacaacaaataaaataaagtcggtcaccaattgcggatttttaaataagcggttcggcacaatcggatcaactgcccggtcttcaactctaaacaagacaactaataaagctaaaccagcaaataccaatcctaaaacgagtgctagcgaacccgtcccaatcatttgaatccccgtcaataaagtcaccaaactggtaatcataatcccagcacctaaataatcgacgtttccggtttgatgtgatttaagcgtttctttaaagaaataacgaacacaaacaattgatactagggcaattggtacattgatataaaagacccaatgccaactaaacgtatcgacaatccagccaccaattaggggacctacaattgaagccgcactataactcgcagtcgcataaccaatcacctgcgcgcgtttgcgtaaatttttgtataagtcggcatagataatgaatggtaaagtattcatcccgccagcaccgatgcccatcaccgttcgtgcaatcagaaagaagacgatattccccgaaaccgcctgaaaaatcgaaccaaccgcaaataataatgtcgccagctggtaagccccacgatttccaatccgttcgcctaatttactccataagggggtcgcaaccgccatccccaaaaggaaaaccgccacaatccagcccatatattgaatcccgtgtaaatcactgataatagcgggcaaagccgtgttgataattgtcccatcgagtcccgccattgtgttggataataataatgctaatgttaccaaaagtgtatttttcttactcacgattgcgtgccccatgtatttttcttttatatttattatagtataagttatttcgtttaacgagcttacttcagtatatcaatcacttttaatatcataccttatcatatacattttcatacaaataaaaaagacgccctcctcaggacgtcttctaactttaatttaatgcgtcaaactgttcgactttttggcgagctttatcactccgccgcatccggataccatattccgttaaaccaatcacaacagcgactatcaagagaatcaataaactcttccaatcttgcttcaaaataagcaaatcgcccgcaaaggcgtagataaacgcgacaatcgttgaacccccaaagcacgccaggccctgtgctcggggggtgaggtgggtgtctccagccgccaagttgacaaaggccgtaggaatcatcggcactgcatagccaattaatacaccaagcgctggatgttgcatcttaattaatgcgcggtaaacacgcgaatccggctttttactgcgatgatttctgacacgggcaaataattggacttgcaacaagttcccgatcgtcaagccaatcgcattgaccacgaaaccaccccaatgacccaaacacgcgccaataatcaatgccaccgctgatgttggcgcacccggaattaaggtgaccccaatcattaacagaccaaacaccaagaaagcatacggccccagatgacgaatctcaagcacatattggcggtaattttgccattgatccaagaaagcaaaaacggcggtctggtgttgccatccaattagaagaatcactaatcctagtaaaatcacaccgcttgctagccaaagtcgtttccgttgtctcttcgtcatctgattcccctcatttctacttaacaaatagtcctagttcctctagtataaacaacctgcaaaggggacaacaagtttattttctattttgattcaattcgttcactaagcgcttattttgatagcgcgtgtagtaataaaaaataatcacgtgcattacgaatgttaataacgacgtccctaataaatacggtgaaacaacatcaaataacgttgtcgaatagagcctcaaagcgagtatttgaaacccaatattactaatagtactaatcaaaacattccacggcgcaccgaacgtcgaatagcgccataagtatgaataaatgacgccaaacacaacgccaatcaacacgcctaggctaactaatcgccaagcagccagcgcttcgccccgcgttagcgttgtgacaacagtgagccacataatcgccattaatgccacttgattaaagtctttgcggatttgcttcatcattttaaccactcctttatttgcttggcataataccgactaacaatatactgtcttccagattgcgtatagaccaccaatcgcgcatttgaacccaccgcaaaattggcaacttgctgcagatttaaaatcgttgtgttattaattctcagaaaaccgttctgcgaaaacggggctaattgttttaaattactagggtagtaatagctattgccatcgattgtcgccaccttcgccaaatgtccaaaggccgtaaaactttcaattgccgttaatgatatgttttgtaatcgatctgttcgcgcatctcgcacctgaatcgattgatcaaaggttagcttcttaaaagcagattcaaccgttgcttgattctgtggttgactgtgaacgacaatcgtatcttgtgcacactttaaatcccaattaaatataattttcattaactcgcctcctctacaaacctaaagatagcagaagatctcgcttaattcgatgactatttgttttgttgcaagctgctctctcttgttgcatataaaaagcctcattcaacaatgaggccttttatgcctatctctatttgtgatacggacttccttgattaatcataaacgcccggtaaatctgttctgtcaatactaagcgcatcaattggtggggtagtgtgagcttgccaaatgaaagtgcatcattggcgcgtttgttaaccgcatcgctagtcccgagtgacccgccgatgacaaatgtgatatctgatttaccataggtcgccaaatcttgaatttcctttgcgaattcttctgaggcacgttgtttgccttgaattgccaggacaatcacatgttccttatctttaatcttgttgagaattcgttcgccttctttgtctttgacgttagtcatttcagcgtcacttaatgattcgggcgctttttcatccgcgacttcaatcatttcgaacttacagaacttactgagccgtttcgcatattccgcgatccccgcttttaaatacttttcctttaatttaccaactgtgattactttaatgttcataaatagcctcctactgttacttacattttaggggaaaacaatgcagaaaaaaagctattcacagtaattcaccggaaagtactgcttatccacaaaagttgtccacatatgcacaagtgttcgtcccaaatatggtatctcgaatttttcttgatactaaataaccgacacctaaattttttcgttaaatttaataaaaaagttatccacccttttttgattgttcgttctcaaattattcggttacaaatccttttatatcagcgttattctggtgttataataattttaaaaaagttatccaccgcctgttaatttttttgtggataactaaaaagaccttttaaccgtgttatacccacaatccacagacttatccacagacgctcggatttcttcccaggttactatccacattgacatttttaaaacttaacattcctgccactttagtctgaatttaaccaaaataaaaaagccgtcaacatctaattgatgctggcggctttaatttattttgctgccgttgtactatctgttgatgctgcttcagtcaacttcactgttgatttcttcaattcaccattatgataatactgaatttcaaccgtactattcatatcgtaactgtaaagtgtcgtgtgtaaatcagcaacacttgtgacatccttgccacctaaaccaacaatgacgtcgtatttactaatccctgccttcttagcaactgagttggcattgactgatgcaacaactaccccactcttcacagaggttggtaatttcaagactgatgattgttgcgttgatgaaacattcgtcaaatcgatgacgctaatcccaagcgctggtcgaacaactttcccatttgcaaccaattggttaataattttgaccacttcgttacttggaatggcaaagcccatcccttcaaccgttgtgctcccgttagaagctaacttcattgaattgatcccgatgacttgtcctgcaaggttaactagcggaccacctgaattcccagggttaatcgctgtatcagtttgaataacggttgcttggccagtcgcttgaccggttgtttcatccgtcacatcaatcgtccgtttctttgctgaaataatcccttgggtaacagaagtagcatattctgagcctaaaggcgaaccaatcgcgagcactgattcaccaggtttaatgctgtcagaatcaccaaacgttgcggtcttcgtcactttggcactatcaatctttaaaacggctaaatcagaaacggcatccgttccgactaagctagcatcaatttttgtgccatcactaaggatgacttccaacttatctgagccagaaacaacgtgattgttcgtgacaatgtaggctttaccatctttcttttcgtagattaaacctgagccttcactcgattcttcaagctcactactactactttttttattggtactatccgcgccaaagagcgcactcaaatcgcctgaattatcttgttgtttttgcaagttaacaactgacacaaccgctttgttgaccttattaaaggcagttgttgtttgtgaagatgagttgactttgatattactaattttagtggcacctgctttagttggtacttgggcagtgcttgagacagtgttacttcccatctttgaaccggcataaccagcaacgccaccaccgattagtgctgcgataacggcaacaacagccgttttcattaatcctgaattctgattcatactaattcacccaaactttctaataaattctgtttattgattatctctatcatagaatgtaaatttgaaaaaattatgaacaagttacgaatattaaattgtttttctaatccgcattttagcgaacttatttcgcaaaaacaactaaaatgtcttctattcagtctaattacacggcaaacaatggatcagcaactgccggatcagtatctagaatttcaaagtctgttcccaccccataatcatgttcctttaagatcgacgcaaccgtcaaatgggccagttccttcatgttattttcttgactcaagtggcctaggaaaacgcgtttagtctggttccccataaacgacatcaaagcggatgccccatcttcattcgataaatggccggtatcactgagaatccgttgtttcaatgaccaaggatactttcccatccgaagcatctctaaatcgtggttgcattccactaaataagcatccgcattttcaattgtcccacgcacttgatcagagacataacccgtatcggtcaggattgcaaaggcacggttattatgatggaattggtagaattgggcagcagccgcatcatgtgacaccccataactttcaatatctaaatcaccaactgacaaggtactacccatttcaaaaatgtgcttgtgttcagcaggcacttcaccaataatcgaagccatcgcatcccatgttggttgatttgcgtacacgtctattccgtatcgccgggccaaaacaccgacaccactactatgatcgcgatgctcatgggtcactaataaactgtccacatctttaagatcgcggccaatactatgcattaaatcttgcacacgtttcccactcattcctgcatcgactaacactttatgattaggtgtttcaatatacgttgtgttgccagaactactgcttgcgagcacgctgacttgcattgcgtctttttctaccatgttttgctctatccccttggtctctttctaaaacaactaaatttcactacggttcttcatcagcgcaccggtaaaggcattaatccgcttaacgacgacactcttagaattcttattctcaatggccacttgccaagctggcacgtacaccgtactactattggcgtccaacaaagcactgtatccgagtttcacccacataatgcgtgagttattcggaatctcattatctgtatataaatcaatgaccgcgtcttgagcagtcaccttcgtactttctttttcacgcaaaacttgaatcttattcgtgtaagtttgcgtgtaatgactaatctgcccgtcttctaatgtaaaaatcaactgaccatgttcatccatgatctgcccgcctgggactttttgcacatatacgacttgttgatcactcgataatgcgtgtgaatagcggtagtcctccgcttgaatcacgttgtctggttccttcataaaggccgccacggctaagcgttggttcccttttttgtaagtcagtggtttatccaattcactcgtcagtgtcatgcgcgctttatcaaacgaaacagtttgaccggttagtttggcactcgccgtttctaataatgtctgatctttttgtcggctggctaaataataaccatccattcggcgcttggagagtttcttcactgaaatttgatcgtcttttaaatccttcataatctggctagtctgtgaaccactagtaatcgccgtcgacgttattgtctgactgcctttcagcgaggcaaataaatagatatccagcgcaataaaaatggcgataaaaatcatttcaattctgcgaaaatccattcatctaactcccttcggttaattcagctttttgcgccatcaatgcggataagctacgccaaacccctttatactgtacaaagtaggttggatttaaatcaatcacttgttcgttactggtttctttggtccattcataaccgacttgcacgttttccacattttctagcaagaaaccattacttgtcaattgattcaaaacagactcggtacttggcaatgtgacttgcttgtcttcagcaggaacgggtacttgcaaactataatttgaaaaatcaatcttttggccagttggtaagaattgtactttcacgctcccaaagttagtctgataaaagactgggaatccttcaacgtaggtccgataagcagtcgaattcgttgctttatcataactatagaaacgcatccctgaaagggcgttacctgtctttaaaagcgcatcaaaactggcttcaaaactctttgttaatgtgcttggtgatttctcattttcatacttcacaaacgaaatttcaccggtatcatggttgatcgttaggcgtttatacaaattgctgtccgtcccatccgtataaatcgcactattgccttgttctttcgtatcaatattatccgtattttgttgattcaacagcgttgtgatgtaataattttcgggttgttgattaactaaataactataaggcaacaacgtttgatccgctgccacatagagtaatggcttgtgattcaacattttttcggtcactttcaaatgcacatcggcatttttaagcacctttttcacacgagcttgtgaaaaaacattgagtgtcgtttggtacacttgatgactttgatcattcatcaaccacaacttaggctgtgtgcccaacgtgattcgaatccgattgaatgtcacgttttgacctaaattattattctgataactgaagacctttttaaaaatagcgtacgaaatattatcaggatataaaagggtcaatgtatgatcctcactaattgcctggtaataatcgtcttcgcttagcttaacttgcttaaactgtgccgacttggcaagctttaaagtcgctttaaactgtggaatcaaactctcttttgagttataaatcaactgactctgattgtctgtccgccacaatagttgcgtcggcaagaagatatcaccgatttttcgttctgtcttacgacttgttgacttagtggtggtttgactgtccgtttggtgctcataatgcgcgttactggtccagattagccatgatagcccgatactgacgataatggcagcaatcagtataacgcgcattaaaaagttattaaatcgcatcccaatcacctccatcagaatcaattggttcatatggcaacgaaatgtagaatgtcgagcctttaccttcttggctatcaacccaaacacgcccacgatgcgcttcgatcacttctttagaaattgccaagcctaaaccagtcccgccttgtttacgagaacgggccttatcaacccggtagaagcgatcaaagatcttaccaaggtctttccgtggaatccctaatccttgatcagagatgcttaaaatcacgtgacgatgtgtttccaataagcgacacgtaatcacgccaccatctggtgaatatttaatcgcattattcatgatattatcgatcacctgcataaatttatcggtatcaatttcaacccataaatcccgcttagtgaagtctcgtgtaatactgtacttcttattcggatcatctgttggcaatttgcccgtgctagttgtcagtttaggcaaatcatctttgtgctcttgatcccgcttgatcatcatatcaaaccgatccagtgcatacccaaagaactcgtttaaattaacatattcgagattcatctttgccgttccttgatccattcgtgacaaactcaatagatcgttgatcattcgaatcatccgatcagtttcttcttgggtcacctttaagaaattgggcgctagctctggatcttgccatgcgccatcattcagcgcttcaatatagctccgcacgcttgttaatggcgtccgcaattcgtgagacacattcgaaacgaattcgcgctgttcttgttcattcttttgttgttcggtgacatcgtggagcacacaaactaaaccggtgatatagccggtttctttttgaattaatgaaaaatcaacatgcaagattaagtcgtgatcttgttgttctgagaaatccaagaccatttcctgttgcgtttctaatagatcgcgcaaagaatattcatcactgattcgtaaaactttaagcaatgactggcccattaactcatcgcgtgtcacatttaaaaaatcttggccagtttcattgataatcgtgatattgcctcgtcgatcagtcgcaatgaccccatcagtcatatgactgagcacactatcaagtcgccgtcgttccgactctgacgcttcttgcgcctcttcaacccgaactgataagttattgaccgcaatcgcgagttgccccagttcatcttgaccataaatcttaacttgcccagagtaatccccacgcgccatttgaatcgcttgtttcttcatttcatcaattggtcgggtaattgcccgggaaataacaatcgataatgccatccctaataaaccagcgactaaagacgaggttaagaaaatgacggtaatcgacgaaatccccttataaacatcttccatactagcccgaatataaacggcgcccacaacggtattactatccccacttgggttcgtcaacggttggatcgctgtataatagctccctagactctcattgtatgccacttcttgttcggtatgcccagagtaaataacctgtttcacccgtgggttacgcgtcttttgaccaacggtactttgattattcaagttcgtgacacctcgaatggtgcccttattatcgacaacttgaatttcggcagaattgcccatatcgccaataatctctttaatattcttgttcgcattaccactattattcagtaactcattactaagttggttttgaatataggatgtcacttgtaaggattgcttaaaatcacgcacattctgatattccagttgcttcacaaaagaagcgccgataacttccaacgttaccagcagcaacaatacgaacacaatggcaattttaaaatgaatcgattgtagcaaccgaattttcttattcatgcggcaaatttactcctgctcaggatttcttaagtagtaaccaacaccccggcgtgtcactaaccattctgggtggctggggttgtcttcaattttttcacgtaaacggcggaccgtcacatcgactgtccggacatcaccgaagtaatcatatccccaaaccgtttgtaacaagtgttcacgggtcatcacttggccgatatgcttggctaaataatgtaacaattcaaattcacgatgcgttaattcaatcttgtcgccccgttttgacacaatataagcatcaggatggatcgttaaatccccgatgttaatctcgtgattttcttcattcgcttctttatctgattgactcgttgtaccttgccggcgtaggttagccttaactcgcgccactaattctcgatttgagaatggtttcgtcacataatcatcggcaccgagttcgaggccaatcactttatcgatttcagaatctttagccgtcaccataataattggcatatcatgcgatttacgcacttggcgggctacttctagcccatcaatcttcggtaacatcagatctaatagaattaaatctgggacagcctcttcaacttgttgtaaggcttcttcaccatcataagccgtgtagacttcgtaaccctctttggttagattaaatttaacaatgtcagagatcggtttttcatcatcaacgactagtatttttttagccatgtgcggatcctccttgaatgtggatgctttgccttctattatactcattttcagaaggcaattcaaaattaggtcaattcctaccaactggattaacggcattgttaatccctataacgattaattcttacgcgctcagtaactttattcaaaaaaaatacaaataactgtttacaaaagtttgtttaatatgctatgatatttaagtcgtaaggcgagacatcatatgggtggttagctcagctggcagagcaacggactcttaatccgtgggtccagggttcgatcccctgaccacccatcaagtatacatgataagtcgttatagaagtgcttaggcattgatataacggcttttttatttcttcttagcagattattattcacagtgaatacgacaaaccgtattcaaacccgtattcacgtattcaacaaaaatcacgcacggggcatatacataacttactgcaggcggtcagattagtggccgttttttaatttggactaacttcattaccaacgacctagattaaacatagaccgtcaaggggcatatagcaactactagcattagtttccgttgtaaaacgcgactgtattcattagttaaagggatgcccccaaatttggggcgatgttttaggggtaacggttcgttacgccatcacatttctatctaaaaacatctgctcaaagttgatccagtctatatctaagctaatggggcggaattttatgctcttcggacaccttatttttacctaacagaacgattatggtagcttattgcatggttcgatctaccgttctactttatctaaagtcccgtttcggtacctcagattgcttccatgcaattagccgaaaccaaaaatggattgggcaacatctcgttaaaatcaacggtatctaaagttaattagggctgatttttcagccgtactgtttctataattggctaagtatctgatgcaccatatcagtgcattagatgctgttgcaatatactaactcatctttaaggagtcatcaattctgtgactccttctttagggcctctaaaatctctaaataaattaatgttaggttttgttaggttttatgtccaacaaaaaccaacattattcattctctttagggtgtctgatttgtacggatagaaataaaaaaagggcattttgtctacttttgtctagttatatttaacaccaaaggctaccaccacgggtttaaagctaattcacgtaggtttacattggataaaccaataatggcttgtcctattcaattactaatccataaactagcctgcgaagttttgcgcaacctacttataaacaagcaactcctgattattatagctttcggcaaaagctaataacgccctattcttaaaccgattataactagatctgctatatcccatcgtgtccgctatatattgccttgttttatgactaccgtctaagtaacacatattaataatggatgcttgcgtatcctccattcctcctacaaccgcttgaatacactttaaatcacgcttagcctgctcatgtaagggatgactagtatttaccgtggctagccgtctaatcgtgccatagctctttaacagctttctggcgtttttgatacttgcttgttggtttattcggtcaatgatcatactgcttcactccttaagtattaattcaattttgatggcatcctaaatcaggactgcatccccgttatcaatgcttcttgaatattaataagccttcactagggtaggactcggcaaactctagcaaagcctgcttcttatgcttcttgaatgatgatgctgttatacctagttcaccgcagatataagccatggttaatttaccagcacttaaatactgcatctttggcaattccctgttaattaccgttaacttacttaaagccacgtctatgtactctagggtctgccgtgcctcgagtgttttaaccgcccgtttctcggttgtattatcactgctaaaagactttggcgcatgatcacaaataggactctttaaatgactagcactacctgcaatatgtttcactcaccaatatcgctttaataatctatctgcttgctgtctgctcttatcctcatcaatatcaaaaagaaacactctgacacctccaacatattaaaaagggatgcactattgccatgtactagcagtaacgcatccctttggttttccaatcaggtattaaactaatttagtcttgtctgttcgttcaatgaacaccaccttattattttgagttgtaacagttaagctcccataacttggtaactgatattctttgctttgctgttgatccttaataataattttgaccatcatatcacctctaaatatcaatcccaaattcttcagttagttgatgatgtttagcgaattccttgccacggtcgggcgtaatcgtacccaagtgttctggtggcagatcttttagtagtcttcgaatagtagtggtcacactggctgagtttttcttagctgctttgtgcattattaagtatcttgaacaacggtcaaccattgtgaccacacaagatctgccagttttgccagctacagtatccagctcccagtggccaatctgagtccgcttattggcagactcaggtcgttcttggagtgtatgcgatataggaatcttcccgcgacgttcctcataaccttttttatggcgcgatttaccatgatgtctaagctttctgatcacccctctggcacctcgtgatgaaagcttctgatcaaataaaccggagtagatgccacgataaatcgtggtgtagctgatctgaaatgatgaggtctctaattttaagcgtgcggcaatttcttctggtgaccattgtagatccaagaataaatgccggattaattgaagcaattggtgatcagaaagtagcgaccggcgtccacaatgagatttttgagcttcgtagcgctcttgagcaacagaaggtgaatatgccgatctatttcgcgataactcacggctaactgtcgccgttgctcgaccaattgtttgggcaattgaagtcagtgaagcctgattattatgcatcaggaatatcgtttcgcgttcactcatggtaagatgtttgtatgggctcatgattatgtgctcccttcgatggttgtcttcgcaaacaccattttacagggattcatatcatgagtctcttttgttgcacttaaagtataaattcaaggcaataaaaaacgttcaccgcaagtgaacgtttttttgacttacctatttagtttgtgaaacggtgttgcgggcgctaacacgtttgaagacgtggacggcaacccctaaaacggtaccgactaaggcagggactaaccaagctaagccgtagttggcgaatggcaagtatgcctgttcgaagccagtcatcgctttaccgaagctactttggctgacgaccgctggaaaagcagttaccatgtcgaaaaaagcaggaacaacggtaaagagaacaacgaatttatacacgactgggtctttgtggaacagtggtgaagcgactgacaataaaatcaagaccattgatagtgggtataagaacatcaacattggcgttgaccaagcgatgatttgatttaaaccgatattagcggtcaagaatgatgccagagtagttagaactaaccaagtgcggtagctaactttgggaaaatgtttatgaaagtcttgggcaaaagccgcaactaaaccgatcgccgtggttaagcaagtgacggtgatcaaagtggctaagatggcctgaccagcgacgcccatataatgattgacaatttggtcaaaagcgatgccgccattagcggaaactttgagtttacctaaggacatcgcgccaacgaagatcaaaccaacgtagatgacggcgatcattgccattgcgaagacgccggcacgggcagtgaccagcgcgacactgttagcgcgttttttgcctaaggtgcgaacggcggtaactacggtgaccccgaaggctaagccagctaaggcgtccatcgtgttataaccttgcaagaaaccattgacgaaagagcctgatgtataagcagcggtggcgtgttgaacaccggcgtggcccattggtgaactaaaagctaagaagaaaacgccagctaataagactaagaaaactggatttaataacttaccgatattgttgacgattttattttcctctaatgagaaaaagagggctaagccgaagaaaacagcggagaaaactaataaaccaactgtttggaaattctttggtactagtggcgctaagccaaccgtgtaggaaacggtggctgtccgtggtgtaccaaaaagtgggccgatggtgccgtggatcaagatcatgaataagagcgcgaatacgggacctaaaggccgcccaacatcatagacaccttcggaacgagtgatactgattgctaaaacggataataatggcaataacacaccagtgactaagaagccaagcgcggcaggcacccaattctgtcccgctagctggcctaaatgtaatggaaaaatcaagttaccagcaccaaagaatagaccaaaaagcattgaactaaccacgaaataatcgcgtttagtgagtttacgttcctctaacataagcagcactccttaaattttgtaggttgtggaaatgtggttcaaagactaagcgtctgttgccccacgtttaaatcatgagtgttgccattgctaagtcgactttagtaatggcggcgatcatcctgcgcgggaatgatcacgataaacaaaaaacgcccaaacctgaaaaattactttcagataaggacgttaataaacgtgttaccaccttgatttgccattttctcacgaaaacagcctcttcgggtacaagcaccaattggtacgaaataccctagctcgataatgggagcccccaatgaacgctcaaagatgattttctaattgtcgcaccttgacgtccttgcaccaaacgacgctcgcttaactggtgaatacaattatacttttcttatcacagcgtttaattttctcattgatttataatgtttctataatttaacgcgattttaagtgtttgtcaagggggtgataaaaataaatttataatttaaggcagtagtccatattgaattaacgtgtcaatgctatctaatacgatggtcgtattatcaaaatgtggctgccattttaggatatcttgcgctttttgggtactcaactgacgattgacgtgcactaataaattgccttcgcgggcggtctggttgaacaaagcagcgctgcttaaaagcaagttcggcatcgttttagtgggaatgttttgggcaatttgcggtcgtttttggcgaatcagtgctgctatctctggtagtgatatctgaccagcagcactatccagaaaacgttgcccgccagcgtgaggtgcggtcagcgcacgaatgtgtaagtcagcaacatcgcgcacatcgatcagattgagtgggatattgggaatcattttgggacgaccgttaagtaaatttttcaatagatcgaagctgccagaaacgtgggcgtctaatgctgggcccatgatcgccaccggattgatcgtagtcagttctaaactgccgtgactttgttcaataaactgccaggcagcctgttcggcgatcagtttgaatttttcataggccgataagcctttttcgttaggatcagtccaatcggcttcagtggtgatgctcgtttggtcgtgattactgaagccgatggcgccaaagttggcggtcatgacaacacgcttgacgtgggcctgttgggcggcctttaaaatgcgtaaaataccctcggtggcagttgtgtcgctgttcgggtcattggaaaaaacgggtgatgctacacttagcacgtagtcgatgttctgcatggctgtcgcccagccagcatcttgagtgagatcagcggcgacaaaacttaaattttcgcggtgttgcgcctgattttcttttagggcggtgcggacggtggtttgtttgtcgagttggcgtaaggtggcacggacgtgataaccttgatttaaaagttgtaagataatgtgcagacccagataaccgttgccgccggtaactaatacgttttttgtcatgatgttatgctcctattccctaatgagggttaatttaatcagtcatgtatgctatgccgttaagtagcatgatccttgtttatggcttctttttgtttataatagtccctagagtatactctagggcaagcaaaagaacactatttcaacgcagcgatttttaccgtagttgaatgatccgccgcgatgtacccaagggtctatccatggatattttgggtcctcatgatatccaagcagttgagtcaaagctaaacaatttaccgcgccggcaaactggctatcaaacacccaaagagcttttctccgctgcttccgccggttaagttaagtccataaaatatgaatattaatgaaaatactgatttaataggatttatcgtgtggctaatctgttcttgcaatttgggagtaaaattaatcattggtgctaaccactcctttacttagaacctaggttttatcaggttattaaccaaccccctatatattagggggccaagcgttcatatagcacgctcaacgcacatctcttttttttacataaaattccctaaatcggaaattcttatccaagttgataggcccgcgaaatgctacgttcggatatattaaacgtccaatttatttctttttcgttcttaatctgataaccagcgattaacatcgcgcctttcattgcaccatttaatacataaaagccaagtggtgtacgttcaaaaatatgtttaatctcgtatgatgaccgctgactgctaaaagttttaattggtttcaaggttgttagcacccaattaacgagtaccacttgttcatccgctgataattcattgaataatttaggcgcgttagtttcttcaaatttatctccaaccactcttagtaggtggcctcattccaatgattttcaaataaaaaacgtcatccaatagatgacgtttttatgtttatgcgtatagagccttttgattatatttaacatattgtttaccaaagctaacaaccattcctgatatcttcttagcgactggataaagcacaagcccaataatgaataatgccagacatgaaatcaattggaataccataaagcacactaagtgtttttaaaacatgaacgtttggtaatgttttatcttgctcccctctagaaaccgtttgacgtgtaacaaacaaattctgtgcaacttgttcctgcgtcaccccaacattcatcctagcttcctttaaagcattcccaactgacattttgccacctccgctataaacctaatttaacgaattaaccccacaaaaacaagcaacaaatctgttgcatccctgctattaaagcatttcaactcactggcagtcttttatttcccgggttaattcccgaaaacagctaacattttctttgttgccttttgggtcttcacgagttcaccttgaatacaccatctgcggaccgttttatcacaggtaatcagtgtcaccattttacgacctggtacatcatcgatgacttttacgtcgtatggactgattgaagctttgtaatcaactttgtacgtgtagactttttccatatccgttaagtagaccttatcgctgacgcgcacattttcaagtggcagaaagatgttttggaaagaatgccctgctaaagcataattgttaactgcacccatttgctgatcaggtctcattgtgcctccaccttgagccattgtgtcctctgagacgcctttcatgactggcaaggccatcttgacacttggaattgcaacttttcctaagacaatcacatcgcctttaatagcggcattcacaatctgttttgtatcgagtgaatcaaccttatcaaaatcaaagctcgcttttttatgttggtttttcttaatttgagcagctgtgacgtccatctgacgatgcgccatcattttaaccagttggttgcggattggattgatgaagaccaacactaatccaaccactaacagaatggctaataagccattaattaatcggtttcttgtctttttttgcataacagtttaagcccttcactagtatttacgactattgtaacacactattttatatttaccggctctaaatccttgtgattcgcaattaataacagcaacacataaaaacgcacaaccgaaactttcggctgtgcgtttgttgtttattttacgtttaagatgtacataaagaccacgaaaacaaagaataaaacatacataattggatgaatttctttgcgacgaccagctgtaatcattgtgattggatagacgataaagcccaatgcaatcccgtcagaaatactgtaagtcagtggcatgcctagaacgattaagaaggcaggaattgcaatttctaatttttcccagtcaattttcttcaatgattgagccattaaaacaccgacaatcactaatgcgggggccgtcacttgtgacgtgacaaccgtcaataatggtgagaagaataaactgaagacgaataacacacccgtcacaacggccgttaaaccagttcgaccaccaacagcaatcccagcggacgattcgacaaaggccccaactggtgatgttccgagtaatgacccagctaacatggccgttgaatctgataccaaagctttcccaacgcggggcatcttgttatctttcatgaagccggcttgttcagctaaaccgaccaatgtcccggcggtatcaaagaaggtcactaataagaaagtgagtacaacgacccacatttgaacggtgttgatatcgccaatgtgatttaaaccagctaagaaagtgggtttcaaacttggcgcagctgcaacaaagtgtgttggcaacttaattaggccactgatggctcccacaattgaggttagaagcatcccgataaagattgctcctggtactttacggaccattaaaataacggtaatgattaagccgaaaacagttaaccaagtcgtcccttgcgagaagtcccccaaaccaacaacggttgatttgttcgcaacaatcaagccaccaccgtgtaaaccgatgaaagccacaaacatcccgatcccagctgaaatcgctagtttcatattccgcggaatggcatcaataatgatttcccgtagcttaaagacagtaatcaacatgaagattaatgaagccacaaatacacccgctaaggccgtctgccatgacacacccatcccgataaccactgaataactgaaaaaggcattaatccctaaagctggtgcggttgcaattgggtatttagcatataaccccatcaagaaacacccgatcgcacttgctaatgctgtggctgcaaaaacagcccctttatccatccctgaatcacctaaaacgctcgggttaacgaataaaatataaaccattgaaataaatgtggtgaatcctgctaggatttcccgttgcactgttgaatgttgttcttcaatcccgaagaaacgacttactctttccataacgactcctctaaaccaactaattttcccactatctttttagtggtaatgtgtgtataatactgactggtgccaaacccatgagaatgaaagtttgttggcgtgtttaacgacacgtttagaaaacgaactttgcattctctttttttgtactctttttcagcaatacctaccagatagcagataagacatttgtttgttcacgatctggaccaacagcaaatgttgctaatggtaaatcaactaattcttgaattcgttcaacatagtgccgcgcattagctggcaagtcttctagcgtcttagcacccgtgatatcttcatcccaaccaggtaattcttcataaatcggtgtgcaacgttctaattcgcggagacttgctggataacgatcgatttgttcgccatctaattcgtaagcgacacagatcttcaatgttttaatcccagttaggacatccacacagtttaatgataattgggtcacacccgccactcgttttgaatgccgaagcacaactgagtcgaaccagccaacgcgtcttgggcgaccagtaacagtaccatattcatgaccggcttcacgaatgaagtcgccagtttcatcatctaactgagttgggaatgggccatcaccaacgcgtgaggtataagccttagccaccccaaccacttcgtcaatccgtgaagcaccaactcctgaacctgttgaaacgccgccggcagggtttgatgatgtcacaaatggatacgtaccttggtcgatatccaagaggatgccttgtgcgccttcaaataagacattccccttttgatccaaaacatcattcaaaacaactgaagtatcacaaacatattgtttaatttcttgaccatattgataatattctgcaaacattgtctcatattcaagtggttcagcaccgtagattttagtaaagagcgcatttttttcgtctaagttttgttttaatttagttgcaaagagttccttgtccaataaatcggcaatccgaatcccactccgagcggctttatccatataagctgggccaatcccacgattagtcgtcccaatcttttgatcacccttggctgcttcttgtaagccatccaatttagaatggtatggcaagataacgtgtgcccgatctgatactcttaattgactcacgttgatcccttgatccgttaaatatttcaattcagaaacgagggtcttcggatttacaacgaccccgttgccaatcacgctgagtttgtcactgttaaaaatcccagatggaattaattgtaaatggtaagttgtgtcacccaactgaatggtatgacctgcattgtcgccaccttgataacgcgcgatagcatcagcattttgacctaaaaagtcggtaatcttgcctttaccttcatcgccccactgtgttccaacaactactacagatgtcatataaacatactcctctattcgaatccgtcttcagatccgctatttaaaccctaaaactcacaaaaactattgtagcaacaaattatctcaaaatcaatataaaagacgaactttaaaatctctaatcagcctttattcagtaaaatcttaacgatacatataaccgataaaatacgaacgtaaataacgaacaatgatccctgttttgacaggcgttcattaaaaaaatacaatataaccacatctaacaccaaaggagctcatcatggtttacgtcagcaatatcattactgtggcaattgcctttccattcgtcgcaatcatcttaaccgttccactgttagtttaccactatcatcgttatggttcgctaaccatcctgcgtagtgtaattctctacagcttcatgttctatttggtagccgcttactgcttaattattcttcccctccccccacgctcggtggtcgctcatttaaccaccccgcgctataacttagttccctttacgtttgtccgggagtttatcaactcaacccatttcgtttggaccgaaccgagttcatacctcgcaacacttaaacaagcggcaaccattcagccgttgtttaacatctttttaaccgttccatttggcatttatttacgttacttctttaaaacgtctttcaaacagaccttattacttagttttacgttattcctattctttgaactcacgcaactttccggactgtatggtatttatcctcgcccttatcggttatttgatgttgatgacttattgctcaacatctctggcgggctgcttggattttatctccagcccttggtcacctttttcttacccactcgtgaaagtttggatcaagcagcctatgcgcgcggtcaaaaagtgggctacttccggcgcttattggcacttgccgttgattactgtgtgttaggcatcattacatttgcaattgctgttatctggcgattactaaaactacccaccattcattcagaaatgcttcagtactgcctggcaactggtgcttacttcttaatgctccccgttttttggcgtggcaaaacacctggtcaatctctcctgcaactacagattgtcgctgaccatcatcctcgttgggcgatcttctggcaccagctactcctatttttcatcgtcattcccagttttcaactctggcgcgtcaccctggatgccgctgttgctagtggccaacaacattttaacgtctatctctttattatcggtctctcactcttaccaccactgttattcaccggtaacttcttattaagttgggtgactaaacgaccacaattattctacgagaaactaacccatacacgggtcattagtagcattcaccccactcagcaaccttaaaaaagccttaaaatcatctttaattcctaaaaatggttaaagtcggatactttacagcttgaattggctatactaaaggtatcattcgctttgagaaaggattattgcttatgtttaataaattgaagttcctcatccccattgcatttactgctattatcggtctgagcgcacaaccggcctttgccgacagcaccacatcgtgggacaaacccgttgccactcttgggaccagcctttctagcacccaaaaagctgatacccttaagacactggaaaatgccgcgaacgtcacagatgtcagtgaactaacagtgaccggttccacacttgtaaaatatcttgatcaaaatcaacaaacatttaacgccaactcaagtgtctactcaagtgctttaattcaaaaaaatgacagcaataccggcatcaatgttaaaattatcgattttaatggccataacaacatcaccacaattacagccaaccaatataaaaatgcggccttaaccgccggcgtcacgaatgcgacaatttacgtgacttccgccattccaatcgatggctctggcgccttagctggcgtttacgccgctttcgctgaaaatggcgattcactcaaccaagcgcaagtaactgctgctcaagacgaaatgagcaccctcagcgatatcacacaggctaataaaggcaccgatggttattcagattcccaattgaataatgccgtcacaggtgccaaaaaagacatggcaagtaagggcaataatctgactgttaaccaaattactaccatcgtcaataatcaactcgaacaaaacaacctcaccaacatcatcaacaataatcaaaaacaacaaatcattaatgttctcgttaaaatccaagattccggtgctttaaattcggatgatttcaagaatcaagccggtaagttaatgaataatatccaaagtggtgcgaaaaacatcttcaataagctcaacacccaaagcaatcggaacttcattcaaaaactctttgatagcatggctaatttcttcaaaggattatttaactaaaggttgaaagttaatatttccacttaagccctgatctgttaggacttttttgctacaaaaatagacatgaaaccattcacatctgtatacttaaagcgtctaaacaaaaaccatacagaggagtttcatgcctatgtctactatacaatacaatgacactgatattcatcattcttttgctcatttttcaaaattggtccatctctccgctattttgcgtcgtgtcaatatccataaatcgcgcggtattaaaactgaacgcttatttgagtggttattgaccaccatctttaatcgttactccattttcagagcagaaaaggctaatgatttttcaaaacgaactgttcgcaattgtctaaatgatccacatattaattggcaacggctggttcagctattagcgatccatttgatccaatacgtgcaacattttaccgatccaagacggcgacaagccttgatcattgatgattcattgtttaaacgtgaattttcacgcaaaactgaattattagctcgtgtttttgaccacgacaaacagcagtattttaaaggctttaggacaataactttaggctggagtgacggcaatacttttttaccgctgaactttgccttgatgtcatcaagccacgccaaaaatcggtttgggcaccttaagtccagtgatcaacgatcactggccgcgaaacgacgtacacaggcaacccgtaaaatgaccgatgtcgctttagaattagtagatgatgcaatcaaatccggcatcaaggccaagtacgtcttattcgatagctggtatgcatcaccgcgtatgtttgcggcattgctaaaacgtcattgtcatgggattggtatgttgaaaaaaactaaaaaagtctattttcgttatcgtggccgagaaatggatattaaaactttatacactaacttacggcgcagtaaatggccaattaaggatagctatctatacagtccaatcgtcacatttgaagttgatggcgaaaaaatcccaatgaagttagtcttcgtaaccaaacgtggccaggctgatcaatatcttgtgttggcgaccacaatgactgacctaagaccagaagcaatcattcagatgtacggtcggcgttggcagatcgaatgttattttaaagtcgctaaacaatacctgcaatttgatcagactcaagtccaaagctatgatgggctttgcggtcacctagcaatggtcatgttaagctatgacgtccttgcattggcgcaacgtgaaaatacggacgacaggacgctgggtgacttattcttcgattatggacgaccgttgcctgatattaagttagtaagtgcgttgaattggctgatacaaacaattactggtctaggtgaaaaactcgacatggcggttgaaacattaactattatttttgacgaatttataaaagcattaccgagtagcctggccaggctactcggtaatgctcaatgaagtggaaactagtaatataccgtgccataaccgtttgacatcaatggttacggtctatttgatactttcaacctttagttatttaactaaataacacaaaaaagccccgcaaactgaagtttacggggctttttatttattcattatttcgttgttgcttttaaggcaactgcgtctgcagcaactgtggtactcattgcgttaaacttaatgtaatcaacagcgggcatgttggtaatgatcaccatcattgccgtcttcttaccagcagcagtaatttgattcaaatcaaccgttgctaataagtcgccatgtttgattgtttggccttcttcaacagcgactgcaaaaggtgcgccgtttaattcaaccgtatcaattcccatgtgcactaagacttctaaaccgttcgttgttttaatcccgattgcatgtttcgttgggaacacagtcataacagtcccatcaactggtgcaacaattttgccgtctgttggaatgacagcgtagccatcaccgagcattttttgagcaaaagttggatcatcaacattttcaatatcgatcaattcaccattagcaactgcatagaaaacatctgtttcacctgagttaatatcgctatcaacaggtgcttcaactggtgcggcagcttgttctggtgtacttgttgcgattggcgtattgtggttataaagttcttttaaagcatcagcaacaaattggacttctgtcccaataataatttgaatgtttgttttatctaaaacgttaatcccagcagtaccagcagctttaatcgctgattggttaacattggcagtgtcttctaattgtaatcgaagacgtgttgtacagttgtcaatcactttgatattgtctttgccaccgattgcagcgtagatccgttttgcttgaaccatgaatttatcatcagtagcgtctgtttcaacgccagcagtatcttcatcaacagcatcttctgcttcacgacctggtgtcatcaagttaaacttcttgatggcaaagttgaacccaaagtagtaaataactgccatgaccaacccttcaaccaataacatcaacggttggttagcaactgggtttttcaaacttaaaacataatcgactaatccagcactaaatgcgaaaccggctgtccagtggaagaaagcagcaacagccaatgaaatccctgtgaaagctgcatgcaatacataaagtggccatgcaacaaacatgaatgagaattcaagtggttctgtcacccctgtaaagaatgacgcaaaaccagcagctaacatcaatgaagctgttgctttacggcgttctggacgagcatttttgtagattgcgtaagccccagcaggtaagccgaacatcatgactgggaagaaaccagcttgatacatccctgtcttaccaatcacagctgaaccattcgcaagtgatttcgcaccacccaagaaattcccgatatcattaatgttagcaacatcaaaccagaacacagagttcaaggcatggtgtaatccggttggaattaataaacggttgaaaaagccgtatagaccggcaccaaaccaacccaatttagaaattgcttcaccaaatgacactaatactgtaaagacggctggccaaacaaagtacaagatagctgaaacaaccatcattgcagttgccgccataattggcactaaacgtttcccactaaagaatgagagggccattggcaacttcacgttgtggaagcgattatacattgcagccgcaattaagccggcaataatcccgattaaaacattcccttcaatcttaccaaaagctgggtttactttagcgatgtctgataaaccttgcatcgcttgaattgaagcaggtgccaagattgtcttaggcactaagaaagcgactaaaccagcaagtgcagctgcaccatcttgatccttagacatcccgagtgctaaaccaacggcgaataataatggcaagttatttaaaattgcaccgccaccggctgataagaaaattgtaaagacgtttgcgtttgaatcgccattgccaacccagttcgcaatccccattaaaattgcggctgctggtaaaacagcaactggcaacattaatgaacgacccattcgttgtaagtaattcttcataagtttttctccattcatttttttcgttaatatgattaaatcattaatgtaaacgataagcaagcgcttaacaatcggtatagacctttataaatagcggttgaaacggtttcatgcacacaaaaatattggtctatacctaaaagttaacaaatgatatctgattcaccaaataaaacggttgcattcacctaccacactctctatactgagggtacaaattaatcgctttgcactaggggtgttcttagaagaactgagataggtttgtacagcctgatccctttgaacctgtaagttcagacttgcgtaggaaagtgcctttctttagactactcacaccacttttctatgcattcgtgcatcgttaagtgatttttttagtttttaattgtgtagttgctgattttcttctgtacttcttcagaaactttaaatccccattgttcataataagggagcatattatagcccgttacttcagagacatgtaacaaaaaatgctgcattcgatcttcatttgaatcataggctaactgattttcgcgataatactgatgtaagatcgggtagaaatcatcgccaaaggtgtttgctagttgggcaaacattgtcattttgacaaagtccccttgttgattgaagtttttatgatcagaaattagataggcgtgcatttctggataatacttatctaaatcaggcatcgcacccgtcatttctttttgcgctgctaacgaataaatattaacactcgattcgacaacttctctccatgtccatagtttttgttgtctctgatgaccacttccatgccagattccccaagggtcctgaagttctaataaacttttcatagctgcatcgcctttaaaacccatgtattcgtttgtcgcatacatataatacgatggcgattctaagaaatgttgtaaatggcgatctgaaaagttaaccggccgaccttcattactgatccctgaaactcgatcttgagcgaccaggaatcggtcataattagccattaacgctttgggatcccccaaatatttctttgccatctcataactcacagtaattaaagcacgatcactaacaagttgaacatcttttgcgtctgtcatttcagtcatttgtttcttaaaatcttcgacactcgtcttgtttgcatcaaagaacggcatttcaccagtggcatcaaagattgacaccctagtaccgcctgaatcatttggattcgtcacataaatagggccatcattttcaactgtaatagtcgtcaccccatttacgagcggatatcgtttctgaacatctcgctcaggcgagccaatcgtcagcgacatcaagtcttgacccgttttgctcaccgtcagcacgtccccttttttggcgtataatccggaaggctctaagcttgaataactcaaggccctttgttgccgagccaattctttattaacatcaccgcggccaatatacagttttgaatatggcgccttttctgaacgtgttacacccttctggtgcctcaccttaggttggaggctatcatcaagcacctcactttgcttactttggtaattagaactggtcgtagcccttgcttcttgtaaaatactcatgcaactggtcgttaaaatgccgaacgctaaaatacctactacttttttgatagtctcatctcctaaaaaattatttttggaacacatttaacttaacacgcttcatcaactccgtatataataaacagataatggtttccataaatattatcgacacataaaatccatattactgcgataaacaattagaccgataagcatacaacacgtattatacaaataataaaaagcattcttcccgctataccaaaccaatgaaaaagtcgtctaaattcgtattttaatccccattataaatcattatttttttaatattccaagaaataaaacacgtcaaaaaggccaacgctaagaatttaacgttggctttttaaaaatgatttattttatagttgcgtactaaaaaaatctgtaattatgttcatcagcgctggcttcaccagatggcgttcaccatttgctgttaaaaatgtcacgtttttggcataagtttgacctttaatctgctgttcaaaagctgctacttgttcatagggaattcgttcatctgctgtcccatgccagaataaaacaggccgttgagcaattgcctgcggctgttcagttaaatcgtaggccgttaaccaacttgtcaataaccctagatcgtcaggttgtgctaactgatgcgcacggatattttcacgaactaagcgcgcataggctagcggtgccggcgagcccatgatacaagccgccactttaatttctggatgcttggttaagagtgccgccgttgtcatcccacccatggaaacacccccgacgccgatgcggtcagcttgaattaaattaagttggtgccagtaatcaacaatcaaactgaattcggcaaggttggtttgaatactttgccaaaaagtccatgacggaatctctgaaacaggttgcagccgttcaccatgattcagtgcatccgaataccacgcgcatcccagcttcagccagtttacgcgcttgcgttaaaaccaattcttttgctgaccgccagccatgatagtaaatcacgagtggtaatggctgatgacgttgttcgtcagcgaccacttccaaaaccggaatccctttaatctggcgttttaagactaataccattagtgaaccctcccccactatttcaagattactataacggaagttggcggggttgtcatcgaattagaatttttcgaaaaataaaaaagccaccagattgatttaatcgggtggcttaaatgtgctccaggcatattcctgcgcttaaccaaatttatcaaatcgacgatgacatcgtcaattcgccaaatccagttaatgctcaaatataaccgcctgcttgcacactctgatctgaaacgtgctttttgaaactgacctttccggttaacctaaaaatagcggttatggctaaaacccgccataatcgctatttttttgttaatcctcaaggtcaaaccgtttcaaaggcactctgtttttaaacatgctttttaaagctgactcttgtgctttgctacatatcgcaaacaatcgactgcgtcgcttattcacgatattaggcaaatgctcagagtcaaaccgctttaaacgcactctacattgcttttggtgcttgtacgcctaataagtctagtgaggcttctaggactgtgctgacactcttcactaatgaaagacgcgcatttttttgatcgtcgtctgccaaaatttttgagtttgcgtaatacttgttgaaggcttttgccaagcgtaatgcgtatttggcaatcactgatggttcgtattcttggctggctttgacaatcacatctgggaagttgccgagcatcttcaagacatcccaagcgttggcatctgaaacgactaagtcagcgtccattgcgacttcttggttggccttgcgcaagatactttgggcacgggcatttgtgtattgcacgtatggacctgtctcaccttcgaaacgcacaacttcttctaagtcaaagtcaaaattatctaaacgatcattcttcaaatcatggaaaataaccgcaccgatgccgacctgttttgcaacttcttctttgtttggtaaatcagggtttttggcttcaatttgttgttgtgctaggttaacggcgtcatttaaaacttcttccaataagatcacacgaccgctacgcgttgataatttcttaccaccttgagtaattaagccgaatggaatatggtgaatttcgtccgaccaatcgttgcccatttcttttaaaacggccttcatttggttgaaatgttcccgttgttcgccaccaacaacgtacaatgattgcacgaagtcgtatgtgtcatgccgatacatcgcagcggctaaatcacgtgtcatgtagagtgttgcgccgtctgattttttaatcaaggctgggttcaagttgtaagctgttaagtcgacgatttcagcaccgcgactttcttgtaagagcccttttgcttcaagtgcgttgaccacaccgtccatcttgtcgttatagaaggcttcaccattaaatgagtcgaattcgacccctaacatcgtatagatcttttggaattcctttaatgattcagttctaaaccatgaccataacttcgttgcttcttcatccccggcttcaagcttacggaaccatgcccgtgcttcatcgtctaattctggatgttcaacgtcttcttgatggaacttaacgtaatatttcaaaaggttcgtgattgggtcttctttaacttcttcttcactcccccattttttataagctacgattaatttaccgaattgagtaccccagtcacccaagtgattgattttaattgggttgaagcccacttttgtcaaaatcttggcgattgagttcccaatcactgttgaccgtaaatggcccattgagatgggtttagcgatgttgggtgatgacatgtcgattggcacgttgccccctttaccgaggtcactttggccgtaattagcggcttgcgttaagacggttttgaggatttggtcgctaaacgtagccttatccaagaagaagttgatgtatggcccgttggcaatcactttttcaaagccggcttgatccatttctgcgactaagtcttgggcgatttgttggggtgctttccgtaatgttttcgctaagataaacgttggaaaagcatagtcccctaagtctgatgtttttggtgtttcaatgagttgtgctactttatctgctggtaaactgtcccctaaaacgcccattaaggcagtggtgacttgttgtttaaaatccatgttgatagcctcctaatatttgtgaacaaaaaaagtcccttccaaataaatgaaagagacgagaattcccgcggtaccactctgattgatcaatcgatccactcaatagtatgcaattgttcaaccaaaagcgcgccgcgtcaacttgattacccaccttacaccgtctgtgagctcgctataaatcgctgttgatgctattcttttgactgttcgaacttgataactagtatatagaacttagctgcacttttcaagcgcaattattctgccgcgagggcttcaattggatctaacttagctgccttacgagaaggtgctagtgccgctaagagactgatgataatgctgatgattatcccgaataggacgtagccactggtaattgccacaattggcatatgcgttaatggttgggccaacgtattgacaagcaattgtccaaggccagcaatgccggcaccaagaacacttgataataacccaatcaagaaggcttctgagacgaataagtgccgaatatctttctttcgggcgccgattgcgcgtagaatcccgatttccttcgtccgttctgacacactgatgtagagcaccacgataatcatgattgctgaaaccaataatgaaatcccggcaatcccagctaagacgtagaaggctaacatcaagtaagtgttaattgaatcgaggatcgcaccaacccctgtgatttggtaatccttttgtgtcttaccgttgactttgctagtgtaggttttgattttattttgaacggctttaacattttgggtcttattaaccgtgactgctgcaaagttgggtgcaaactctaatccttgcgcttggtacatcttggctaatgtgccatatgtgacggcttcagtcccagaattgatgatccctgaaactttcacatcttggcgcatttgaactggacgttgatccttactaatggcattgacgtaaatggttactgtccgaccaaccatcttcttgtaatttttatctaacttcttagccattgccttcgttaaaataatttcgttggccccaggtttagtcccggtcttaatatcttggacacgttcggttttattaaacgtttggaacatttggactgtttcactcttcttttgatagtgcacttggacaccattcatgtagtagcccttttcaaccttcgtcacgtttttgaccttattaaggcggttgatatccttatcagctaagttaccttgttcaccggcttcaatctgtttgcgcgtgaggtttcttgcaatctgaatcgtatttggattaacttgcgatgaaatctgatcattaatatagccagtcaccccttgacccaagcctagcattaaaatgacggagaaaatcccaatggacgcgccaaaaataatgagcaaattccgtttaatatcgtagcgcatgtgttgcattgccattttgaaagcagacataaaacttaatggactactcttcttaattaccggaccagttggagctgggtaagctggttttaattgcttgtcataatcaatctgcccatcaaccatgtggacaacccgtgttccgtggtcagcaacggcttgtgaatgggttacggcgatgacgagtttgccatctttggcaatcttttgtaagatttcgagaatctcggccgtattctggctatctaacgcacccgttggttcatcggcaatgatgacatctggatcagcagccaaggctctggcaatagcaacccgttgcttttgtccacctgacaattggttgggatgtttatggatatgttccttcaagccaacttgttccaataaggcagtcgctttggcaacccgttccttatgtgatagatcagtcatttcaagtggcaccatcacattttccaagttagtcaaatgactaattaaattaaagctctggaaaataaagccaatcgtttgactccgataagcatcaaatttcttttcggatgcattctttaaagatgtcccatcaacgatgagctccccatcgtattggtgatctaacccaccgatgatgttcagcaacgtcgatttaccgccgcctgattccccgaggattgaaacaaattcgccacggtcaaagcttaaattgatgccttttaagactttaaattcagtcttgttcatataataggacttgtgaatatctttaatctctaataatgtcaatgtcgtacgctcccactaattagattgctcgtaagtatcacgattttttagtcgatagataataaatatactttatcagagcgcctttaaacaaacaatcggccttaggtctgataacgaaaagagtgtgatgtaagtcgggtatccgccgaggattaaatttcagagaataaaaaagaggttgcaacaaaatttcttctgttgcaacctcttttgcatgaatctttaagcgagtgacgggaatcggacccgcgacgcaagcttgggaagcttgagttttaccactaaactacactcgcattacttgatatagtatagcatattatttccgatttgtgcatattttttgaaaaaaaaaggtttaaacgcttaacaaatagcgtatgtatgcggtatactattgataacaacttgattggagtccttttaatggccgattcgcaaaatacaattcctgaatcaaccgcatttcattgccctgcatgtcaggcgccaattgaatatggtatcaagcgttgcccaggctgtcagactgcgatcttctatcgcgatatgtctgaaacattctggaacgatcgtaaattaaatctttttaaacaaacggatgccattcaacggggcaattgacttaaattaactattcaaccgtcactttttgtgacggtttttttaattgttaataattaattcagaaggcgttaccattgttaatttgatagacttcacgactcattttagccgtatttttaatttgaaaccaacggtgatggttgctataatggcacaccatacacaggaggtctttatgatagagaagaacaaaatgagtttatttagcctagtgatgctcggtttaagttccatcatcggttccggttggctgtttggtgcatgggaggcaacgaccgtggcaggcccagcagccatcatctcttggattgttggcgcaattgtgattggtgcaattgcctttaattacgttgaactcgggacgatgtttcctgaaagtggcgggatgagtcactatgcccaatatagtcacggttcattactcggcttcatcgcagcgtgggccaattgggtatcattagtcacgattatcccaatcgaagccgtcgctgctgtccagtatatgagttcttggccatgggcgtgggctaactggacgaatcactttatgcaccacgctgaaatttcgaatcgtggcttgctcgtcgtctttgcctttatcatcgtcttcacccttttaaatttctggtccgttaaattcttgacccgttttaccagcttcattgcaatctttaaattaggtgtgccattattaaccattattatgttagtctcaactggtttccatactggcaacttcgggcattcaatggcgacgtttatgccctatggttccgccaaaatttttgcagccacttcgatttctgggattatcttttcatacaatgcctttcaaacagtaatcaatgtcggcagtgaaatccgtgattctaaacggaatattggacgtggaattgcaatttcacttgggatcagtattgtgatttatctactcttgcaaattacctttatcggttctgtttcacccgccttgctcgccaaagtcggttggcacggtttaaacttccaatcaccctttgccgacttagccattttacttggaatccattggttagccgtcttactttacttagatgcgtttgtttcaccctttgggaccggcgtttcctttgtcgcttcatgtgcacggacattagcagcattaaagcagaacaaacacatgccaccgattgtcggccgcatgaacgaacaatataatattcctcgcattgcgatggtcattaacgccatcgtcagcatgctactcgtttcaatttttagaagttggggaacgttagccagcgtgatttcaaccgcaacgttgattgcctatttaaccggcccggtcaccgtcatgtcattacgtaaaatggcccctgatatgaaccgccctgttcagtcaccttggatgaaaatcatgtcgccattatcctttgtccttgccagtttggcaacttactgggcaatgtggccaacaaccattaaggtgattggcgtcattatgcttggcttaccattttatttctactatgagtatcggattcactgggaaaatacttgggctcaattcaaaggaagcttatggttaattatctatctcgcattgctttcgctgatttcattcttgggcagtcgggaattcaacggaattaacctgattccttacccactcgatttcgtcttaattagcgcattagccctcatcttttactattggggaattatcagtcgcttctattcgaaatacttctcacgcgcaacacgaattaacgatgatgtgcaactttaagcatgactaaaaaggacgccaaacaacggttaaagttgtttggcgtccttttggtatctctagattgtttctgctaaaatgaatcgtaaagtacgttatctttttcgggaggcgctaaccaatgcaaaaattgaccgttcaatctactgatcgaatccatactttaaatgtcgtgacttggtttccaatccaaaaaccggtcgcagttgtccaaattctaactgggatggccgaatatatcgaacgttatgatgctttcgctcaattcttagcagatcgtgggattatcgtcatcggacacgatcatattgggcaaggccactccattcagtccaacgatgagctcggttatttcgggccaaacgggctccagacgctagtcaacgattgtaccttaatcggtcgcattgtccacgaggaatacccagagctaccattatttgtgctcggacactcaatgggctcaatgctagcgacacaatatgttaagcaaactgaagtgccgattactggagccatcttcatgggcgttatcgatgtacccttcattcttaaacccgccttaccaatcgttaaattaatcggcgccattgcagctaagcgccccggtactgtctggaataacttggcgtttggggtctatcctaaacgatttgatgctcaccgacctttttcatggttaagttacaatcaagcaaacgtggcggcctacgaacagcatccattgtgtggctacgtcttttcaaatagcggttttgcaatgctcttcaccctcactgagttaactcggcatgctgattggcaacttgccttacaatcccgcccagttctcgtaatgagtggcgccgacgatccagctggcggttatggtcgccgcgcgcggcatttaacgaaccaattcaaaaagcgcaccgttaacaacgcaacggtgcgcattctacctcatacagcgcatgaaattttattagaaacagatgctacccagcattaccaattcatctacgattggttgactaaagtaatttctgaatctcctttaacacaccatagttctcattagtgtcggcacgataagtcgcatattggatcatatcgtcggcagcattccccatcaaataactatgttcaacggtttgcagcatttctttatcattataagtatccccgaaggccatcatttgcgccggcgtgatgttgaaataatccgccaaaaagcgcattgcatggcctttgtcgatgccttgattcataatatcgatccattcaacaccagcaaccgttactgaataagccggttcaaattcgggtgcgaaaacagcttcatactgtgcttgactatcttttcccgggaaataaatcgtaaacttgttggcttcaacactaacctgcgttaaatcaggtacatattcaatgttggcatagaattgccgcaaagtcgcgtcataatctcgatattgtgtttcaacgtacgccgcgtccatcccacaaatcacgccaatcccatctggcgtttgattaacgaattggaccatccgttggtaatcagctaacggcaataaacttttgaataaagtttcaccttgataaccaattgcacccccgttatcgctgacgtaaaccattgtgtcagcaagttcgggaaacatttgctttaacgtgtacattggtcgaccgctggcagctgcgaattgaacccctttagcatgtaattgctgaatggttggtataaagtttggtggcaactggccactctcagttaataaggtatgatccatatcggatgcgattaatttaattgtcatgcttagttctctcctatcccttagataccttaataatataccgtttatgccaattcatcgcaaccggttacattcaaaaataatcatactcgacatccatcgcttcgatcctgcccattaacacgcgctaaactaaataactcccccgttcagattccgatagtctctctaaaagatttgaatctcattgatattgaatgttcttttaaccgcgtcggacattagcgcaatttggttatcaatttcatcccaattggtagtaacaaatccagaatccaaactatcaatcatgtcattactgtttagtctaatctttaataataactgtttccccttggttgtaagtcgatagtatactttacgactatcaccaataaaactccccacattagcccgttcaattaatcctttttcacccaacgattggcattggcgggaaatagctggtcgagaaacgcccatacaagcagcaaggttgccgggcgtttcttctttttcacgatccattttttccatcaacaaatattgttcgagtgataagtcaacattttgcaaaactgtgacaaataattgatccaaaatattacgatatttaatgagcattaataattgattattcataataagcattactccttctatctattttgaggacctacaatatgcgaactagtaatcctgctctgctccacaggcattatattatataaattaattaaatgtaaatagctgaaattaacggtattgacaaaaaaatatttttaataagttttaaccctattaatatttttttattgaaattcgccaagtttgtgatgtttttatttattaaatgaccttttaatcgcgatgcagtttacagcttgtagctttcagccgtttttatagttcaaataataattatattgataagaaaatatttatttaaagctatcgttttctactaatggtttaattccttaaaattgatgcaactttttttgaatagtgctaataattgtcgctaatccattggctaaaccagtcataatgaggtaaataatcaataatcgatgtactttttgaacaaaaaaagaccgctatctaaagtgatagcgatccttttttaatccataatgcccgtggcaggattcgaacctgtacttggttacccaaacagcgacctgaacgctgcgcgtctgccagttccgccacacgggcgattgtgctacaagactattgtaccagtgttacagagccctgccaatacccatttattaatatttcgcttataataatagttgataagggagggattcagatgcaagtcatcacaaattcaaccgttcgtgcggtcctgcaggcacggcctgccatcagtcataaaggcgattttggccgcgtcttaatcattggtggtagtcagcaatacggcggtgctgcgattatgagtgcctgtgcggctgtttatgctggtgctggattagtttccgttgctagtgacttaagtgttctcagcggactgcacgcgcgcttaccagaagccatgttcattgattatcaacaacccttcgtgcagtggtcgtctgcagtccaggctgctgatgtcgttgttgtcggacctggtcttggcattacttcgtttgccgttgaactgctgagaaaaatcttacaaaccatccaaccaacacaaacactgattatcgatggttcagcactatcaatcatcgcacatgaaaaactgacgatcccgaatacgcaactcattttaaccccgcatcaaatggaatgggcgcgcctcagcggtgttgcaatcgagcagcaaacggttgctgctaatcaagccgcactcgctgcttatccaaacgcgactttagtgcttaaaaaacatcacactgaggtctatcatcagcaacaggttcagcaactaaccatcggtgggccttccatggcaactggcggtagcggcgatacactgactggtattattgccgcattctgtggtcaatttggcacccactatcagacgatttgtgccgctgtttatacccacagtgcgattgctgatgaactcgccaaaacccaatacgtcacacttcctagccaagtgattcagaccttaccacactatatggctaaaatgattcatcaatcttaaaaaaacagcattccttttgaaagggctgctgtttattaattcgctttaagtaatgaaagttctgcatccgtcaacgcacggtattggccacggtctaaatcatctggcaatgccagtggtcccatcttaagccgttctagcgtcaagacttccttgccgaccgcatgaaacatccgcttcacttgatggaatttaccttcatgaatctcaacggtaatctgactttcttgttgcgcctcatcaacactcagaatttcaagctgtgctggttgtgcagtaaaatcactcaacacgagccccgcttcaaaccgcgcttgatcctctgccgtgacaatcccggcaatcgtggcgcgataaaccttgctgacgtgttttttaggactcaacaaggcatggcttaaatcgccgtcattcgtcaacaataataagccggttgtatctttatccaatcgccccactggaaacagatcatcccgcaagtccgctggtgccaataaatcaagcactgttttctggggatcagtcgtcgccgaaatcacacccgccggtttgttcatcagccaataaaaataggtttgataacgcacgggttcgtcgtcaacatagacaacggtcgcctcgttcactttgaacttcgcatctttgaccacagtcccatcaacgcgcacgcgtcccgctttaaaaagtacctttaattctttgcgtgaagccacattcatatgacttaaaaagcgatcaattctcatttgattctcaactttcttctaaaccgatccaagttactcccaatgacatagtccgctaagcgcgatttaagcaccaacgcggcgtaaacagccacacctaggccaacgctaatcattaagactagaacgctctgaagacggctgtacgggttaaagacaaggtataaccccttgactgctcccgccgttaccaaatacatcaccaatgagaagcctaaaacgccgattaagcgccgaatggttttgcgtaatgcaaagtgataatagcgatgcagtgctgcaatcattaaaaccgaacttgtcgcaaaggctaagccggtcgatactagcgggccatagacacggaaaaaataaatcgctgggtactgcgccacaattttgacgatgaatccgatgaataagtaaaacaatgccaagcggttctgatagaggccttgtaagacagcgcctaaaaccgtaaagaggccgagcataatagaaatgtaagatgaaaattgtaagacactaatcccaagcgtatcatgcgcgtagaataacgtgtaaagcggaccggcaaccgccgccatcccaaatgccgctggaatcatcactaagttgaataattgcaaagtactgccgatttgatgttgcaattctttttgattgccccgcacatgcgcagctgacatcaatggaatcgccgtgaccgccatggcagcagcgagtgaaacggtgattgaaatcagtttattcgcattagctgcaaataaagcatacaagttatacaactgatgatcactggcaaccacgaaatcatgcatcatcggattaaacgtgtattggtcgatgatatagaccaagttgacacttgcgtcgattacgatgaatggaattgattggcgcacaatcccttttaacaagtcagtcgttgacacttctaattcgttgttactattggccactaactctgaaatgcgaccgcgttgtttcaaataatagaaaatcagtaataacaagccggcagcagccccaatgaatgcggcaaatgtcgcctgcgtcacagcatccacgtagctgcctttaaacacttgcataatcataaaagcggtcacggtcatgtacagcacgcgggctgcttgttcaataaattgcgaaatcgcagacggcgccatttcggcatagccttggaaaaagccccgcataatactgagcaatggaataatcaatagcggccagcttaatgaccggaagaccggtaccatccgcggatcacccgctgctagaacgggcgctaacgcaaagagtgcgagcgctgataaaacacccattgccaacattaaaatcagcgactttctgaaaagacgctgaccaatgccatactcattcatttcgttatagcgtgcaatttgtttcgatagcgcccctggaatcccagccgtcgagatcactaaaaagacactataaatttggtatccttttgcaaataatgtgttggcttgtaagaaattcgcgccaaaccagattggccacggaattacatagacggcgcccagaattcgcgagaaaatactcccagcggtcatccaagcggagccccgtaacatcttactttgtgaagatctatccgtcgcctttgtttcaggtgaattggtcatttcccataactcccttattaaacgtcaaaaagcatcttcctaccattttagaggattgccccaagccttgcaattcctttaacaaaactttatgaaaaagagtgcttctgatgacggttagcaactgagcattaatacaaaattcccaataatccaggttttaagattattgggaattttagattaagcggaagttgttgtcatcagaagcacgtttcaataagagtgctattagcgcttgcccagattttgagcactaacctaaaaacgggaattatggcgtactcggccatgattcccgttttgtagttaggcgcagaaatctagcgccaatagaacgtttcaaaaaaagagccccgccttcgcggagctctctgccatctcattatttagcttgtttactttgttgaatcaaataccacgtcaacagaatgctgacaaaaaccatgataccgccaaagattggtgtactgtctaagccccaagctgccgatgcttgcccgccaactaatgagcctatcgtaatcccgatattaaaggctgagatattcaaagccgaagccaatggaatatcatttggcgtgattttttcagccaactgcacaatgtataattggagccctggaacgttcatgaaggcgaaaaagcccatcaataaaacgttaattaaaccgaaccaatgggcatttaacgttaacatgaatagcaacaaggtcactaacaagccaacaaacattttcaatagcgccatcaacggttggtgatttgaccatttgccacccaacgtatttccaaaagccaccatcagaccataaataattaagatgatcacaacggcccttggtgaccaacccatttttgattctaaaatcggcgttacaggcgaagactggcgcaaaagcgaccgtcaagttaccaatgataaagacaaccataatccccaacaataaatttttccgcggccaacgacttgttaaaatcgccaaaatcggtgccccaatcgtaattcccaaagcatacatcgatacggttagtcctgcttgactcatcgtaatcccaaaatccttaatcatcaatggcattaagccgacactgatgaattctgtcgaaccaatcgcaaaagcactgattgccaatgctagtaatgtgaggttcgcccgttgtttactactcatactgccacactcctattagactttttttactgatgtactatattattcaataggagcgtgattttcacaatcacgcactttttagtcagtaggttactgaaaagtaataattgagtcttatcacaatgaaaaggtgaatcaaaattagaaatgaatgagaaaacatataacattggcgttgaagctacgatggaaattatcggcggtaaatggaaacccgttattctttgtcatttgcgcaaccaaccacggcgatcaagcgagctcttacaacgcatcccaaagatttcgcaaaaggtgctcactgcacaattacgcgaactcgaaaacgatggcatcatcaatcgtaaaatttatcaagaaattccgccacgcgttgaatacagcctctctgaatacggtcagtcactcaataaaatcttaaatctcctctgtttatggggcgaagataacattgatcgccgccaaacagcgggtgaatcaatcactgttttacatcgcgatcaaatcaatccaatcgaatcgaataaaaaaaagacagccaactaggctgcctttttgcttgtcatgatttttgccgaccaaatttcacgaaataaataaccaccatgatcattaagaaaattaaaccaacaatgattgaaatccgcgtttccggattaatgaacatgaaaactagtgtcacacacaacattgccaaagtgatgtaattggaatagggtgaccaaggcatcttaaatggatgttgtgccatcttgtcagcgtgttgctttctaaaggcaatttggctgatcaaaatgacgaaccatggcaccatccctggtaagacacttgaactataaacgagcacgaagacattgccagcttttggataaacaagtggtaaaatggcgtttaaaatcaccccgattaaaatccctaatgaaatcgccccgaccgcataaaatgggacaccgtggcggtttaatttcaagaatcgttttggtaactgcccattattggccaacgtgaacgtcattcgactggcactgtaaatccctgagttagcacccgataaggctgctgtaatcactacaaagttaatgattgatgctgcagcggtaatcccaattttagcaaaggtttgcacaaacggtgaaccgacctgactcaattcattccaaggataaatgctcaagattacgaaaatcgccccaatatagaaaatcaaaatccgcgcaacagtggattgaattgctttaaccaatgttgattgtggattttcagcctcgccagccgtaatcccaatcaattcaatcccttgataggatgccaagacaattgccaaggcgaagatgaagcctttaaagccacccgtaaagaagccgtgcgtccacaaattactaatgccgactggatgcatatggtttccaatcccaaaaacaatgagtccaaggcctgccacgatcatcagaataatcgtgacgactttaatcaacgcaaaccagaattccaattcaccaaacatgctgactgaaattaagttggccgcacataagaacgtaatcgcgaccagtcccggtacccagcccggcaagttcggccaccagaattctaagtaaccgccgatggcaatcatttcactcatccccacgacaacgaattggaagacattgctccaagctgttaagtaaccaaaaattggatgcatatattccgttgcaaacttggcaaaggaccccgtatctggatcaacatacagcatttctccaagtgcacgcataatgagatacagcaataaaccagcaatcccatacgcaatcagcacagacggccccgtccatttaattgtcgtgttggcccccataaaaagcccaaccccaattgtcccgccaagtgcaatcatctgcatctgacgggcagttaaatttcgtttcatagtcctcaaacccctctattttagcatcatcattattggttaaccccagaatctaaatttacttatcatcgtataataaaaaacacccaaaagcaatagtcgctctcatctttttatcatcttaaaagcgctttagaataacccttatattaattgaaggataattaggcccctaaatattaattttaaataagaaaaagcagttactgcgagaaacagtaactgcttttttgaaacatgctttttggttgcaacaacttccgcttaatctaaaatttcaaataatcctaaaacctggattatttgaaattttttattaatgctcagttgctaaccgcaaccaaacgcactcttgtctgaaacgtgcttttcaagctaactttctgcgcttatcccagtgaatcaaacaatcgactacgtcgcttattcgcttccctctgataatgctcaaaagttgaccgagcttgaacccactctttttgaaacgcactctaattggcgacgatattgaccaatttatttggaatggcaatcactttgcgcaccgtcttgtcagcaatgaattcagctactttttcatttgccttagccatcgcttctaattcttccttcggtgtgtctttagccactgttactttggcctttaacttaccgttaacttggaagatcacttctacttcgttagcgaccaatgctgctgggtcaaatgttggccagtccacgtaactgattgagtcatcatggccaagcattgcccataattcttccatcatgtgtggtgcaattggcgctaataacttcacgaagccttcagcgtattcacgtggtagtgtgtcaactttataagcatcattgatgaagaccatcaattgtgaaatggccacgttaaagtgcatgctttcgaagtcttctgtcactttcttaacagtttcgttgtaactcttcttcaattgttcatcattttcagcgacaatcttgcttgatagttggtcgttttcgtcggtatcttcttctgtgtatagacgccatacccggtccaagaatttacgcgcgccggctaagcccttttcactccatgaaatggaagcatctaatgggcccatgaacatttcgtataaacgtaatgtatcagcgccaaagcgatcgacaacatcatcagggttaacaacgttcccttttgatttcgacattttttcgtggttatcgcctaaaatcataccttggttatataggtgttggaatggttccttcgttggcacgaccccgatatcatacaagaacttgtgccagaaacgaacatataataaatgaagcacagcatgttccgcaccaccgatgtacatatcaactggtaaccagtctttcaacttatcaaagtcagccaatttatcagggttcttaggatcgatataacgaaggtaataccatgagctaccagcccattgtggcattgtattcgtttcacgacggcctttgcgcccattttcgtcggttacgtttaaccagtccgttaagttcgcaagtggactttcaccagtccctgaaggcttgatatcacttgttaatggtaattcaagtggtaattgagcttctggcaccactgatgttgtgccatcttcccaatgaataattggaatcggttcaccccagtagcgttgacgtgagaataaccagtcacgtaacttgtagctcacttgttcatgaccagcattatgcgttactaaccaatcaatcatcttgtcgattgctacctgtttgtctaaaccatcaaggaaatctgaattaatcatcacaccaggttctgtgtgaacagcttcttcaggattaccaccagccacaactggtttcaatggtaaaccaaatttcttcgcaaattcccaatcacgagggtcatgtgcagggacagccatcacagcaccagtcccgtatgaggctagaacgtaatctgaaatccagattggtaaccgttcgccattgactggattaatggcgtaagcacctgtaaaggcccctgttttatctttcgccaaatcagtccgttcaagatcactcttgtgttcgatttcttttaaataagcatcaacagctgctttttgttcaggcgttgtgatatcggccactaatttatgttctggggccatcacgatatagctgacaccaaacattgtgtcggcacgcgtggtgaagacatcaatctgagcgtcgtggttttcaacagcaaatgatacttcagcgccttttgagcggccaatccagttgcgttgcatatctttgacactttcaggccaatcaactaggtctaagtcgtcgattaaacgatcagcataagccgtaatcttcaacatccattgacgcattggtttccggtaaacaggatagccaccgcgttctgttttgccatcgatgacttcttcgtttgcgacaacggtccctaaatcagggctccagttaacagccacttcagcttcataagctaagcccttttcgtacattttttcaaaaatccattgggtccatttgtagaaatcaggatccgttgtattcacttcacgatcccaatcgtatgagaagcctaatgaattgatttggcgtttgaacgtattaatattggtttgcgtgaaatcagcaggattattcccagtatccaacgcatattgttcagcaggtaagccgaatgcatcccaacccattgggtgcaacacgttgaagccttgcatccgtttcatccgggccaagatatcagttgccgtataaccttcaggatggccaacgtgtaagccttgacctgacggatatgggaacatatctaatgcatagaaatttttcttatttttatcttctgttgttttgaacgatttgtgtgattgccagtaagcttgccacttttgttcaactgcgcgatgatcgtaagtcatatcaaacactcctttttttaacgtgctttcaaaagcatggacacttttgacgcactcttttttaattcacttaacgccaataaaaaagtcctatggtataaataccataggacgaattgaccgcgatgccacctaagttctgtccaatctatattggacaaccctctggccttaacgcggcagacgtttctatctactatcagttcaatagaaaactcaaaggtgagttcgttatgttaaacgacgtgttcccactaaccacacgctctctgaacgcttaacgataactactaatccttctcaacgttaaataattgttcttagcataccaaactcttacttcaatttcaagacttggccgactaagattaaatcagaatgtaaattgttcgctgattttaattgtgcgatactggtattatttttttgtgcgattgaccaaagactatcgcctgatttaaccgtataagtcttcccagaattcgtgttaggcgtcgttggcgttgtagcgccagccgttaattttaagacttgacctgggtagataaagttattcttaatattattagccttgattaattgcgccatcgaaatgccattacggttagcaattccccagacagaatcgccggccttaaccgtataagtcttcccagaagtttgccctggatttgtactgtttgtattattattgtttgaattaccagttgttgcacctcggctaaccactaatttttgaccaggatagataaagttgttccggatattattccatttaaccaagtcagccattgagatgccgtaacggtttgaaattgcccagacagaatcccctgatttaaccatataagttttatttgaggtctgattaccgttattgctgtttgaattattgttatttgtattgccagttgcggtttttgaaactgttagaacatcgccagggtgaatcatattattcttgatgttattccaactaattaaatcgttcattgaaatcccatatttgttggcaatcgcccaaacagagtcgccggctttaacggtatacttatcaccattagctggtgttgttggattcgttggtgttgtagggtctgttgggtttgtcgtcccactattgttgttgccagctgcactacttgaaacaatcaagacttggcctgggtgaatcatattgttcttgatgttattccagctaatcaagtcattcattgaaatcccataccgattagcaatcccccaaacagaatcgccggctttaacggtgtattttgtcccattttcaggtgtcgttggcgtggttagagtcgttgttcccccattattgttaccagtattggtccctggcgtgtcatattgcgttaaattgtattgttgaatcaaacggttcaaacttgacgcataattggttgctgttgcataacgtccttgtaagtattgtgtggcttgttgatagctacttgtatggctcttaaatgccccttgataataaggcgttgcaccaaatgaagtattccgtagcacatgcacataatcttgtaacgattggtagtatgaaggatattttctaaatgcagcttggatctgatacatgttcccatgaccatcatcttcccaagtccacatataaacagaactaccattgtaagtcccttttaccccaaacaagttataattaggggcagaacctaaaccactgctcccaaatcctgattctaatgatgcttgggcaatcataacagaggcgtacaaatcgttatcacccgctaattgttgagctgaactagcaattgaattgatgaaattttgtgcgcttgaattagctgctgccataacaacgccagcggttgcgatattggcactcgtactttgcactccagaaattggttgcgcttgagatggtgccggttgtggcgtagccacctttgtcgcttcattttcagtcaattgaggttttacaacaggttgttgtgttgattgggattcagttgtcgttgtgcttgaactagttgttgatgatgttgcactacttgctgtattagctgttgtagcttggtcatcattgtttgcactatttaacacatcttcagtggctgctttggcccgattcgaaaaactaggtgcaattgctgaacccatcaagacggttgcccctgcaaaagtcgtcacattacgaactttcttaattctaatttcccgcttctgcttatgtaagcttaccttttgagctgcaattcgctgttttctagtctctttcaattctaacgcctccgaatttccactattattgtctgtggcacaattaacttgagcttcacctgaactttattataatattaataaagaggaaaaacaatcctatcacgcaactacttttattagttgtcttatgcttaataattattgtatcatttaataatcttctttgtctttaattacagcttattttgaaaggatttcttaaaaatgaccaaacgattttcggctagtttattcattcttggcacaatcagttttctaatcattttaatcagcgttgtgcaccatgccacttgggttatacattttgatacccttatcagaactggcatccggtcgctttcctccccattgatggatactgtaagcattgcgattacgtcgatcggcaatccctatagtataatgactttgaccaccattgtaacgcttggtttgctgggctttaaacagtggtcagcagctagctttttagtcattaacatggtccttttttcaacgcttaaccactttattaagatgagcgtccaacgaccacggcccccatttcaccatcttgtctacgcaggcggctacagcttccctagcggtcatgcttcgggggcgcttctttttttcggaactttaagcatcctagtttactacttaattcgtcaacgcgtttggcgaaaaatagcgattggcacctgtttaatattggcactatgcatcggccttagtcggatttacgtacttgttcattatccgagtgatgtcttagctggctttttattagcaacggcgtgtctcggcggttcatggtactgttttattcattttaaattattgcatctgaaggagtcctaacacatgatacttgatcatcccactaaatttgcacattttctattagaccaggcaattcggcccggcgatgtcgtaattgatgccaccgtggggcatggcgatgataccttatttttagcagaacgcgttgctgattttggtcaggtttacggtttcgaaattcaaaaagaagccatcgaaacctgcgcggatcgtcttacaaaagcaaaccaagcaaaccaggttactttgcttaatcaaggacacgagcggattatcactgccttaccacccgagttaaaagtgcaagccgccatttttagcttaggcgcactcagtcctgattcttttgaacacgtgacattgcctaacacgacaatctctgcctatcatcaaattctctcacggcttaatcgcggtggcttactggtattcgttgttgatcctcggttcaatgaaactcaagaagaaatcgactatctaatcgccgacttaagtcgcctagaaccaaccaattaccaagtaacccactacaaggcaatcaacgccgaccaaggacaagtcctagcgatagaaaaaatttagagtgcgtcgtaaggcgaatatccgctgaggattaacacagcgtcgtgaatgattacaacgtaatcgtttgcggctcagggttaaccggaagcggatgacttacaaagcacgtttagagtgtgatcccagtcgggtatctcttgaggattagcctagactggcgaatgattgctgaaagcaatcgtttgcggctcagggttaaccggaggcggatgccttacagagcacgtttagagtgcgtcgtcagtcgattatctcctattcaaacattaaaaaaaggcccagtcatcattgatgactgggccttttactatcttataatgtcccgaccacttttgtaccgtgtgcttcggaaatttgtaaacgttctgttaacgcgtcgacattgtcggctgtaatgccaccgccaggtaaaatcacaatctgcccatcagcagcttgaattaacgtttttaaacgggcttcgtcgatgggcgcgtctaacggccccccatgcgttaaaatccgtttaacatcatgatcaatcagccattccattgctgcagcttgttgatcagccgcaatttcatcgaaagccatatggaaaacaacttgcatcccattggcagcaccaatcaacatttccatcgcttcttcgtcgatttgattgtcaggtgttaggcaaccaaggacgatgccgtcagcgcctaattcttgcgctgaaaagatatcagcttccataatttttaattcttgatcgttataaacaaagttgccgccacgcggacgaatcatgaccatcactggtacatcgtgttcatgcgcataacgcactgattcagccatcacaccccggctaaccgttgtgcctccgacagccaagttgtcgttcaactcaattcgtttagcaccattgcggattgctgccggaattttagtgaaattttcaacacaaacttctttgattaacatggatgaaccctccaaattttaatttaatcctttatgcaaatagcattgcacctaagacaagtaggcccaagataatccggtaccaaccgaagaccttgaaatcatgtttcttgatgtaatccatcaagaatttgattgaaataattgaaacgatgaatgaaaccaacatcccgactaataaaatgattgattgatcgcccgtaaacgtattgccttggtacaagaatttaccaatcttcaagattgccacgccgaccatcgttggaattgccatgaagaacgagaattccgcacccacaaaccgtgatgtccctaaaataattgcccctaaaatcgtagcgcctgaacgggatgtcccaggaataattgataaggcttggaaacagccaatccaaaaggccgtcaaccaaggtaacgtatttaaatcagcaaatttcggtgtggtatgcttgttgcgattttcgatgacgatgaacaaaaccccgtataaaatcaacatgctggccacaatccagtttttcatcagatgttcatccatccagtcattcaatgggaatccaataatgactgatggaatcaccgccacaattaccttaaaccataacgtccacgtttgtttttgttcgagctggttcttacgtggtgagaaaggattcaatttatggaagtatagaatcacaaccgccataatcgctccaaattgaatcacataattaaacatatcgatgaatgcttttgattcatcaagtttcaaaacactaccgaccaacactaaatggccggttgaactaattggtagccattctgtaaaaccttcgacaatccctaaaatgattgtcttaatcatatttaaagttaacacaatactaatccctccgtaatccataatcgtttattagtatactcattctaaagttagattgcgactcaaattgaaagcttaatcaaattttattcaattcgcccgcaggaaaagccaaatgacgttgatccatcactgcttgaaaatcggctggtagttcgctttgaaccgtgacataccgttcttcaaatggatgatagaacgttaactcgcgacagtgcaatgcttgacgcggtaataaatcatcggccacaccgtataaattatcaccaattaagggatgccccagtgatgcaaaatgaacccgaatctgatgtgtccgacctgttagtaacttcaacttaactaacgtggcatcggtgccatgggcttcttgccaatattccgttaatgagcgtttgccaccaaccccaacgacccgccgcatgtaaaaatcatccgaccgtttgattggccgatcaatccacgcatgttgcggataatctaaccgcatatcaccactggcaatcgcaacatatgttttttgcaattctttagattggagttgcttatccaacaaactatgcgcgaaaccgtgcttggtgaacatcatcaaaccacttgtatcgcgatcgaggcgcgttactacgtgcactgcctggctctcagcattttggtcaatcaagtattgtttgacgaaattggccattgtgttgtgcggatggttcggtgccggtaacgacgccacaaacgccggtttatcgaccactaaaaaatggtcgtcttcaaaaaccactttcaagtcccctttaactgggatgacgtgttcgacggccacttccggtgcgaggtaaacagtcaccacatcgttttgaaccagttgggcattggtatgtgcctcctggccgttgacgaggattgtgccacctgcaaatttaattttagttaactgactgcgagaaagcttatgccgccgtaaaaaattccgcaacacacagccttctgcatcttgatattgccattcaaatttcatgttttgacccaataaatgcatcttcgacacggttccagaaatgggtgtgtcgataacgtgcaaactgtattctttcctttgcaattttaaattgcatcgaggcaattggtcgatccttaaatgtgaattgatcaattgtcacaacgtaatcacttgtcttagaaggcttcaggagcaaccattcatccgatggtaacacgattggtgccgatagtgttcgatatacgcgattattaatcgacgcaatttcggtcatctgcatcgcgtctaagcgtggatgtaaaaccgcgccaccaatcgacttactataagctgtcgacccagttggtgtggaaatacagagcccatcgcccctaaaactttcaaaaaaattctctttaatgtaaacgtccgtccgcaaagtcgctgcataccgacgtaacgtcacttcattgagcgccaaactgcgactgatttcgtgcgtatccgcatattcgattttaacttctaataacggatagctaatactctgcccgagatcttcttgcaaggcgacgactagatcatcgacttcaaaatcgcgccagtcagtgtaaaaccctaaatgtcctgtgtgcacgccaataaaccggatgtgcgctaaatcgtgggcgtaccgatgaaaggcagataaaagcgtcccatctccaccaactgaaatgaccacatcgggcgtttgatcatcaatgacaaaccccgtattgatcaatttttgcgttaagcgattggcaacttgaacggaagaactaccgtcattgctaaataccgttactttcaatctggcgtctctccttcagaatcattttcagttgccttttcaagtgcgttttgccattttccatatgagaagagttgttgtgcttcttgaatttcttcacgaatttcagacatttctttatctaacataaaggatgcttcggccgctcttttaagccgcgccttcagcgtttcaggaaattccccttgatatttataatttaatgaatgttcaatggttgcccaaaagttcatcgacattgttcgaatctgaatctcggccaaaatcaatttttcaccactgattagttggactggatattcaattacaatatgatatgaccggtaaccacttggtttaacatttgaaacgtaatcccgttcttcaacaattttcatatcagtccgttggtgcaaaaggcccacaatttcatggatatcttccacaaactgacacataatccgcaaaccagcgatatcttgcatatcttgttcgagtaaatcttctgtaatgtagcggcgttgcatcttttctttgatactatcgattggtttaacgcgcccagttacaaattcgatgggtgcatgttcattattttgttggtattgcttgcgcatcccacgtaatttaatttttaattcgctaacggcctgttcataaggcattaaaaacttcttccaattttcgaccattataaacccctcattcactctgtcacatacagcactattttaacatagattagaattgaataaataataatcgtctgaaatacaaatttcattacaagtctgcttttttgtgctaggataataacattgcttttttaaaaaggagctcaaccgatgtcacaaacgattgaacgcgaatttaagacgatgctaacggcggcgcaattctcgcaactaaaagcggactatccatttgcagcgccgtttgtgcaaaccaattattacttcgaactgcctaaccagggattggctaaacgtcactgggggttgcgtattcgactctttgacacctatgccgaacagacgctaaaggtgccaaccgtagaaaatgctcatagtctgattgaaatcactgatcgtctaacacttgagcaggctactcacttaattgagcaccaaaccgtattatcgtctggtcagatcgctgtctattttgcagcacaagccgtgattatcaaagaattgttcatctggggacaggcaacaacgcaccgccagaccgcgtctttagttgctggcctgttaacgcttgatgttacccaataccctgacgaaacccaggattatgaagtcgaaattgaagtcaccaacgtccaagaaggggcaacttggtttaaatcatttgtcacccgctatcaattaagtgaacaaataccacccaataaaattatgcgcgcccttatccatcaagcttaaactttgccaagctaacttattgcataattttaaaatcttgttagagtagacagtacaagcgcgtcgagcagtatatacaatatagaaagtttgggggaaccaacttgttagaagtatttttatttatcaacccaatcgggcaactttgtttacgttccgaagaggcacttttaaagattatcggcgaaaccgatgcaaatattcattttaagtttattccagtcttaaacttaaaaaacgtcgagcattacatgcagtttcagcaacaaaatagtcatgatttaaacttacgtaatcacattttcagcaccatttatgaagcagtactcgcttataaggcagcaacgttccaggggggcaagaagagccaatcatttttaatgcaactgcaacaagcattccgtgaaccagatatggaacttaacaacgaattagtccttacaattgctaaacgcgtaggacttgataccgaaatgttacttgaagattggcacagtccacttactaaacaggcatttgattcagatcaacaattatcttgtgagatgaacattcagatgaccccttcagcagtagtcttcaactattcaaaaggtgaaagcgaatcaggcttattgattgaaaattgcgattcctatgaactcttgaaacaagcctgttgtgctgaaacaacacctgaacagactttccaagcacttcaaaaacaaaaaagcatcctctcacgggttgctttgcatgttatttcttaatcttagaaccggtggtcaaccgacccccggttcttttttaatgcttgtttcaaagctatttgcccccattgtgcaaataaggattgctttagtagtggttgttggagtaagggcgttaccgctaaaaaaagatcaattggttgggcactcaaccaccacgttacccgactttcaaactgactgagctgataaatgggtggtacattacgtgtgcagtaacaccagtccggaacggcttgcaagcgttcatggtgtgcataacaatccgcctgtaacgcaacataatgtgcgtcttgcagccctaatcgacggtcaataatttgttgctgcataggctgtgacttgcccttataatgattggctggcagtcttgtttgtgctacaagcaagcgcacaaacgccttagttgtcaatcgcagggtttgccaagcataaccagcaaaatcacgggcgacaatatggtgatataacacccatttcccccactttggcaaatagcttaccacataaaagccccactgccgccgatagttgataaaccccaactgttgctggcttaaataatggttagtaaaacaataccgttcaccaaccacccataatacaggtaatcggcgctgctgatagccgattgttcgttggtttaacttatctggcgtcaatgggctgcattggtattcaataattaatggttgctgattccgcgttaaccatacatcagcgcgctgtgtctcgccgacaggtacttcaaaggtagcatgccagcccaacgcatgtgctaattcagcaatcgcctgttttcccgccagatgggctggactctcaccaccaccagatacacgttctgcgatatgtgcgaaatatggtgctttatgcaccccacgatgcaactgaaccagttgttgacaatgtggacagaaataccgcgctacttgctgttgtttggctgcttgatcggcgcgaattaagcacccgttagtggtctgtgcaactttcattatttatcacccccaccgaaaatacgcaaaaaaataacgggttctcctaaatttaggaaaacccgttatttttaatgtttgaagtagtagcgtgttaactcaagcgcactattatccatgactttttcaccgaattcacttaaaaaagctgctgtgtattctgacttctgcccgtattcattagcgaccgctaaatcatcccgtgcaaacgcttcggtcgtattctccataaaaataataatctgtgcatagtactgatgtttgtaaagaaataggttcgacacaccactttcgatgtgtagctgttgtgccaaagcaatccaatcgtcaaatgacttaaacgataacacaatctgtttcattggattgtccgcttgattcatataagcggtcatttcatcctcttcctcagtcgcatcatcttggaccgtatctcgtttcaacagttgttctttaatgtattcagtaataccgtctttgccttgcaccatttctgattgacctttaccaccgtcaaagtttggcatattcttactaatcagtaattctaacccttgatcgttaggcaacacttggaacgttactgcatcgttgttcgcaaatgtgtgttcactgtccacttcttccagaattgaatagaagaaccgctcaatctttttatgattgctcaacaaatcaagtccagtaatcccgcgttcttctaaatcatcattttctaatagaacccgaattgtgttctcgtcgattttttccattctcatgggacaacgcccctttctaacgcgcttcttatagcgtcgtaattcactttctttgacctaccataccagtatctggcgtaacattcaagtatctacatcacagcaattaattttttaacccatcaaaaaagtcgaggctgttaacagccccgactctcctctagaatcctgctagtaattgtgcttgttgtaattccaatgcccgtacttcacgtggtaagaaacgacgaatttcatcttcgttataaccaacctgaagtcgtttttcatccaaaataattggacgacgtaatagccctgggttcttttgaactaaatctaataattcgttgattgataagtcatcaattttaatgtttaattcttggaaaaccttagaacgcgttgagataatttcttccgtgccatcttcggtcatgcgtaagattgttttaatttcatttttattgagaggctccgaaaagatattgcgttcttggtatggaatattgtgttcctctaaccacgcccgggctttacgacaagatgtacaacttggtgatgtatataacgtaaccatatgtctctctcctttattaacatgacaccttacttaacaataagacaatcattttctctcttacaaattttattatacgcgagtcagcactagaaaactaccctaaaattaaatttattaattattttttaataattaataaatagacatttggacataaaacgtctaattaaaacggtttattgttaaattttcccactcaccattaatttttatgtttttacatttatatttatcattcaaaaaaaattatagtagtttctactttctaatgaaaattcacttattttttgtaagtttcatcaacgccgcctatattacacactccgacatcaattgtcaaatcctgttgggcaactatcacgggtacgtccccaacagtcgcttgtgcttgtgcctgtagcgtttctgccgaaaccccttgtggtaaatgcgttaatagaattttagctgcgccactttcttgtgccaagttaccggattgcgttgttgtcatatgcgccattttaccagtgcgatcttcaagaaaattcgtatcagtcatcagtaaatctgcagactgacaaaaagcagctaattctgggaaatacgccgtatctgcagtaaagaccaagacctgccccgtcgtttgttcttcaattcgaacagcgaatgctgggacaggatgcactgtccgtttgaaagttactttcaacggccccagggtcagctctgtgtcttcttgataaccaaagccctgcgtcacacccggttgtgtcaaactgccaaagtggagtggatcttgcagatgcccgtaaataggtaaaatgggttcctttttggttccttgatgcagttgccaataatattgtaaaacccccacatcagcaatgtgatcgtgatgatagtgcgtgagaaggaccacatctagttgcaatgggtcaaattgtttctcaagcgctaataaagcgccactcccacaatctagcaataaatgatacgccccacttgttaataaataactactagtcccaacaccggcgtatggatatccaccgtaataacctaagactgttaattgcatttttaaatgaccacctttctaatttctatagtagcgcattccgggtatcgcgcgcactatatttactaactaaataaaaaaagaccgccacccaaatggatgacggccctaatgctattgaatgacttggactttcttagctttaacttcttgatagaaaatcgtaacgctcataattaagtatggatagaaccacaagagacctagtccagcagtcatatagacgaccagttcccatccaataaatgataaagtaagcccgagtaatttcagccagttcccttttaaaatcacccatgaaaggctaaagattaatttgagtggtgcttgtggtaaatcaaacttcaacagtactaaaatctgataatacgttaaaatcacgggttgcaacagtgacaaaaccaacatcaccgtcacaaacaataagacagtttcagaaattgtcccctgctggctaatgtttagcaaataaggcgcaacggaatctaatccattaaaagtgaattgaaatacacgatcccaaccgagtaaccgataaaacggcgccaacccaattaatagtaagatccagtttaacacttgttgaacaagattcaataccacaagatgggtatacaacggttgccggaataacaataaggtatcccggtaatagctgggcttattctggctaactttataaacacctaagaaaacagcatttaaaaagataaagtataagaaataattggcaaaggtgttgagcatttgataaccaaatgaactggcgccaaacacgccttcaatcattgagtcgactactatctcaactaacaaccaaagcgcgactaaagcggccattttctgccagtttccttttaataattgacgcgcttttgcgcggtacatagctaattgcaaaaactttccctccgagtttagtagaacacatcactattgagcggtgcattcacaattcgattgtagatattggccgtaattagatagaaaacaaagtaaatgatgataaacaggccgcaaacgatataggctaattgtaacccaggattatctaaaaacaaacccaataaccgaattgcaaagaaggcgtgcatcgatcccaaaataattggcagtaaaaagagcatcaaaatttggaaataaatcgtgcgcttaatctcaccgtcactcatcccaatttttttcaatgttttatactgcaaaatctcttcttgtgcttctgacaattgtttcaacatgatgatactaccagtggctaacatgaagattaacccaataaaaatggcgacatacatataaaatccgaagtttgcgttagcaatatctcggttaggtttttttaaaagcacagaatagcggcttaactcttctagccgttgatcagtggttttaatttcataatgggtttgcccagcttttttgtgcgtcattaaataatcccattgtttgggcttttgagatagacggaataaatcgcgcattaatcgtttttgcttttgttgggcagcggagagctgaactgcatagatttgatcaactgaagttgcttggacttgttgatattcagcatcattggccacaatcacgtttaagttaccatcaaagaagacatcagaaccgtttggaaatagcttacgaatgtgtacaatccgaaaatctgaaagcccagactgttttaattgcaacgggattccagctcttttcggtggcaaacctacacctgctctgcgaggcatcttcagcattgttaatggcaagttaatgatggtcaccacagtatttttcttcaatttagttgctggtaacttaaattgttgcgccattacttggttgtattgggataatggcatgacaacagctgctccatccattttgatgccttcccgatttaacggtgaattgaccttaaatcgagcatccaccaatttaaacgaagacattgtttgactaaccggctgaacatgatattgcgttaaaattttgtcgaccgctgctttttgactttgtgtataaaccaaatccaccggaatgttctgccgtaatgtatcttgaccgtgcgtataaatcatcgccgcacttccgattgcggtaatagtaactgcacttaaaatcgtaatcatccacaacatctttgcattctttttaaaacgaaaactcaaattcgtaacgtttaacaaatgtgtcccacgataataaagccgtttccagtgccgttctaactgtagccaaatttgcgtataggcctgaaaaaaagccagtgtgccaaaaatttcaagtaataaaatggttagtaaataaaccaaatcaatcccaaaaccatagcgccgctctaagctcggcatcaaaaccagtgtttggtctgccaaataatagccgctgataatcaatacaggtgcaataatcccccataaataagtcagccagttcggtcggcgcactttccgactgactgcagatggttgcagcaatgtcactaattgataccgataaatcatcgtactgtttaaaaaaccagttaataggaacaacccgccaaaggtgaatgtcgtttgttcaatggcccgccatgatattaaaaacggcatggcaaccgcaatccccatcatgcgtaataataacatcgcgaataatttcgaaaaaagaatcccgaataacaacccgataatcagggcaatcacaccgataatcaaactttcaaagaagaagagtaagctaatctgaaatttagtcaccccgatgacacttaaaacaccaatctcccgccgacgccttttaatgaaaaataaattagcatatgccaagaaaaaagcggcaaacagcaaaataattaaacctgctacttggatcatccggccaaaagctaaagattcaccagccatcttgaggtgcctaaagattggcacagtttgaatcgacgtaaagcagaaataaaccacaatcgcggcaacacaggcaatcacataagccgcatagtcgcgcgcatgattaatcgcatttctaacggttaggtgtaacagcattgaaacggcctcctccacctatggttgcttgcatatcaataatttgattgaagaattgttgccgatcaccattgcgaacgatttccgagaataattgaccatctttaatgaaaagaattcgccgacagtaactagctgtaaaggcatcatgcgtgaccaataaaattgtcgtcttttcctgacgattaatcacggttaaatattgtaaaagctccgtagctgattttgaatctaaacttccagttggttcgtcggccaataacaaagtgggattggtaatcattgcgcgcccacatgccactcgttggcgctgtccaattgaaacttcatccggataacgatccaacaaactactaatgcccaagactcggctaactttatccaaccgtttttcaatcactggcacacttaacttatcaagcgctaatggcagtaacatgttttcgcgaaccgtcagtgaatctagtaagttaaaatcttgaaaaataaagcccaaatcttgccgcctaaaattagcaagcttagcttcccgcatccgactcacaacttgatctttaattaacacttgaccatgcgtcggccgatcaatggtcgcaatcatatttaataaggtcgttttcccagcgcctgaagggcccataataccgacaaactcccacggttcaatatcaaatgaaatattattaagcgcattgaccagactaaaccgatgcccgtagactttcgaaacttgttggactgatacgactgccattttttcacatcccttaactaattggtattcattttagcagagttgaccgcaaaagcccattttataactacgaccttagttggttgtcttttctagtgaaagtggttaatattagtctatctatgtatgaggagaattcattatgtttgaaattatgattgttgaagacgatccaacgattgccaacttaatcgctgagaacttaaataagtggcaattacacgcaaatattacgaccgatttcgataccattttcgaccaatttttaaccaataaaccccatctgattttactcgatatcaacctgcccgtttatgacgggttctactggtgtcgcaaaattcgtgaagtatctaaagtccccataattttcatttctagtcgcagtaccaacatggacatggtgatgtcgatgaacatgggcggcgatgacttcgtcaataaacctttttcgatggaagttttaattgccaaaattaacgccctcttacgacggacttacaactacgtcgaccaaaatgccgatatcatcgaacataacggcctaatgattaacctccaaagcggcggagctcaggtgggtgagactaccattgatctttccaaaaacgaatataagctcctccaatttctgatgcgtcaacacggccagattgtcagtcgcgaaaagttattgcgtgccctctgggacgatgaacggtttgtcgacgacaacacactaaccgttaacatcaatcggcttcgcaaaaaaattgaaagtactggtttagaagactacattcagacgaaaattggccaaggctatatcatcccctaaggagttattatgacgtttaaaaaattcttacgtgatcatttatttcatatcgcttttttcttcagcggtatgattgttctggatatcgtcctatggctcgaccctagtatgcgctttgctaaggcgacacttttatacctcgatttattgctggcgctttttttctgcgcctttttggttggcttatacgtctaccatctcaagtggtaccgcacaatccaaacacgcttagatgctaaagaagatagcctcaactggccacttacaggcgctacctcggctgaaaaacaattcattcaacactacgtgaatcaactgctagcctatcatcaacaaagcatcgaccgactaatctcagcgcaacaagatcaaaagaatttcattgatggctgggtgcacgaaagcaaggtccccctggcagctactcaattgctcattgaatccatcgaagaccagattccagaagacaaattcaatcaattaaccgatgaactgattcaaattgaacactacgttgaacaagtgctctactactcgcgtctcgatagtttttctaaggattacttggtgcaggaatacgatttaaaacctttagtcaaccaaatcatccgccaaaatcgcaattattttattcaaaaacacatccaatttaaactgcttggtgccgatcaaaccgtcttaaccgacgctaaatggctggcttttattttgaatcaaatcatttccaatgcgttaaagtatacccccgacggcgcacaaattacggtacagattgaacgtgacgaacaaggcgtttggttaagtgtcatcgatacagggattgggattccggctgaagacctaccccggatttttgataaagggttcaccggtcaaaatgggcgctattctaaccaacgttcaaccggtttagggctctactttgcacgtgccttaagtgaaaagctcggtcacgaactcaccgttagctcccaacaaggcagtggttccacttttaaattactctttccttttttaagttactacaacacggatgacgatgacggcttattcggcaaaacccatcctgcagacaaatgaagcggagcttcaaaatgcgtaaaacacttttaatcactacacttttaacaataacactcctagcaggttgccaagctaaaaaaccggcttcatcaaccacatcccgcgcgcagccaactacgacgacctacgccaaccgaacaacaactaaaaaagccctcgcggccgattcacagacttggttgtttaacaaacaactcctttctaagcaaactaaaaacggtctttctgatgacatcaccgtttcaaatattgctcaaatgaccactcctaaaagttggctgacctctaaaggcaccttcacaagtcagccgattaattatcaacaaatttcgtttaaaaaatggcaacaagatagccgcagtcatctgatgaagagctatcaaaagacactccatctgatgactgtggcacaagtcaacgctgcattacacaaattgggggctgactttaagattaaacacctctcagatctcgtctttcttgagactaagactgggaaaaatacaattgaccaaggattcgttgccaaaggaaatcgcctatacgcaattacagctcattacagagatctacaaaaccccaccaattttgaccgcggacagttattcgtcagtcaaaaagcaaccgccaaaacaacagccagtcctgttgccctcgaccaactcaatggcacttggattgcggccgcaacaacgacgagtgctaatgacaccggaaaactgatggtcaaagatggcttcatgtaccaaaaacgttatgatagtattgaacgctctgccattcaagatcttgccaaatacactttagtaacgctcaatcaaaatacaatctatgctgctcaaaaaagggatgcagcacaagctggttatcaattaacccctaagtcgattgctagtggtgatagtatcggttatctctacctcttcatgaatgatcatgaactgctacgcatcggtgctggtcaagcaacaagctatcaaaagacggactcactagtagctgctgccgatttatcacagactgatcaaaccatttttgagcaacttgatcaacaaaagcctggtgaatcagcttcaaccattacggtcaaagcaggtcccgctgttgtcgggatgagtgatagtatcaactatctaaccgatgcaaccgctggccagatttcgaacaatatcgtcattggtaacgttcaaaacgggcacgtcaccattgcaagtgagtcaactcattaattataggcacaaaaaaaggtccgacatgaatgtcggaccttttttgtgcttaagccgcttgatcgcgggctgcttcttcttttaaagccatgtctgtggcaatcttgatgaatggtaggtaaatgagcactgaaacaagtaagttcactgctgctaataccccaccttgccaactaaccgttgcgatgaccccaccgataattggtggtgttacccaaggtggcataaccgttgcagcgggcactaacccggtgctagttgcaaagtatgcaattgtaacgatcaccattggtgtggcaatatatggaatgaataaaattgggttcaatacgattggcaaaccaaatgttaatggttcgttaatattgaagaccccaggagcggcactcaaattcccaacgattgaatattgtttattctttcgacccactaaccagattgcaatgattaagcctaaagtggcaccagtcccacctaagttaacaaatgaatcaaagaatggtttgttaacaatatatggtgctgctttaccagctttaatcgcatttaagttagctgtaattgcaggtgcattgattgtttgcatgaatggttcgatcatgttagcaccgtgtaacccgaagaaccataagaatggtgtgatgaatgctaataataatgctgaaggatagctgtttgcaagtccttgaaatggttcttggacggctttgtagaatgatgtcacaatattttcaacaccaaagcctaatagaattgttgcaaataatgagaagactgcgatggtaatcattgatggcaataatgccgcgaatgattgtgaaactgcaggtggtaccccatcaggcatcttaatgactaagtgtttattacccaataaacgtctgagaatttctgttgaaatcatcgcaacgattaaagcaacgaacaagcccattgagtccatccctgcaagaccgccagcagcaaagaatgaccctaatgctgttacgccggctgctagtggattgatattatatgacttacctaaattgtaagcaactaggaagacgataaacacagaaagaatcgcaaatatcccgctccaagcattgcccccgaatttagtccagatataagccttttcagcgcccttaccaactgtctttgagaacacactatccatgaaattggtatatgccggaattggtaaattattaatcaaggttgcaaaagcccccaagatcatcaatggcatcgttgttacgaaggcgtcacgaatggcaaatgtcgttgattcccaacttttgccacaactggtaaaaagcgtttctccatgaaactgataaatgaatccattaacctcactccttttcctgaatcataattaaaaaataattgctattacaagtattatgttacagaaagcgttgtcaaacgataaccccgttcattacctatgaatgtccagtttttcacaaaaactaaaaaaagcgccaacccattctaatcatggattgacgctcttttttatccgtgttaggtatataccaatgacggaaaatgaaaattaaatttttaataactttattttacatattactttcaatgaacaagctttgcccatataacgggctttttagcggctaatgattttttgacatcgataatccgttgattggcactccctctgaactgcaatgtcagatccatttggtccttcatgaagcgcccatcaactaagatatcaatcttagacagcaactcgagtttatcatctgattcttgcatcagttcttcccacgtatatcctgtccatgaccagacgtcctttgtctgcccataagtggcgcgaattcggtctactagcgataaacaagtcttggtattcaagaacggttcgccacctaataacgtcagtccttggacataagattgccctaaatcagcaataatttggtcttctaattcagttgtataagggcggccatagcgaaaattctgcgccactcgattgtaacaaccggggcaagcaaacatgcaaccactcacatataggctacagcgcaccccttcgccatcaacaaagttaaacggtttataatctgcaatataatcctggcttagtgtttcagaaagccattctttgggcgccggattcttcgggccttgttgttttactgccatcttcaaaaactccttcaaatcccgtattcacaattactgccgtgcaacgttgttattatcgttgccaatggtaatatgcatgtgcttaactcgactggcgatttccttatgccgaccatgcaccattggacgttgttgtggattgcctagataaccacaagtccgcttaacgacgtcacatgtagcagcatccgtgttcccacattgtgggcattggaacccgcgttctgtcggcttaaagtcccctttaaacccacatttaaagcattgatcaattggcgtattcgtgcctaagtagccgacacgatcgtaagcataatcccagacagcttctaaagcctttggattttgacgcagatttgggtattcacagtaatgaatgaacccaccagaacagtattttggataatctttttcaaaatctaatttttcaaatggggttggtgctttacgcacatcgtagtggaaactatttgtgtagtattctttgtctgtaatattttcgacaatgccaaatttttgcgtatctttttgacagaacgtatttgttaaactttctgctggtgtgctgtaaacagagaagtgatagccgtattccttttcccaatcaacgcagtgattatagaggtctttaacgacgtctaccgtaaaggcttttgccttggcatccttttcccagtctggcccaaagaaggctgtaccgacttcataaaggccaatatagcccaatgaaacagttgcgcgtgaatttttaaagacttcatcaacactatcggttttcttcaaacgcttgccaaaggcaccatattcataaagaatcggcgcattttctggcttcgcttctttagcgcgttccactttaaagaccagggcttccttgcagacttgcaaccgttgttctagaatttcccagaacttagcttggttgccatcagcttcaagtgcaatccgtggtaaattgattgtcaccacgccgagattcatccggccactattcacttcttcaccatgttcgtttttccagccttgtaagaagcttcgacaacccattggtgctttgaaagaacccgttaattccaccaacttgtcatacattaaaacatcgggatacatccgttttgtggcacattcaacagctaattgtttgatgtcataatttggatcagttggatttaagtttaagccgcgttttactgcaaaaactaatttagggaagatggcagtccgtttttctttacctaatccttcaattcgaattgaaagaattgctttttgaatcgcacgttcaatccagttactgcctaatccaaaaccaagcgttgtaaatggtgtttggccttgggatgaatataaagtattgatttcatattccaacgcttgcatggcgtcataaatatctttttcagtcttggtttgcgcataatccttttgttttgcttcgccatcaatccaattcttggcatctgctaaatgtttggcataattcttttcggcaaatggtgccaataattcatccacccgatcagcggaacaaccaccatattgactagaagcaacgttagcaataatttgtgacatttgtgccgtagcagtttgaatcgaatgtggcgcttcaacttcggcattcccaatcttaaagccatgattcaacatttctttaaaatcgattaaacaacaattggtcattggactatatggttggtaatccaaatcgtgccaatgaatctcgccttttaaatgggcgttcgccactttatcaggcaacatcttaagccccatcgctttagcaactgtccctgccgttaggtcccgctgtgtattaaaaacatgactatctttattcgcattttcattgaccacagtttggtcttttttcaataatttttgaatggtaaagttgatatcagttgccttattccgggcaaagtcccgttgcgtccggtagttaatgtattcttgggcaatatcatattggtgatgttctaaaagtttatgttccacaatattttgcagttcatagattttaacatctttatcaaatcggctgccgacttcactcacaacatctagtgcgactgtgtttaacacttgatagtctaatggctctaattccgtcttcacatttttagcggctttaataattgcttgttcgattttatccgcagaaaaaggcatgattcgcccatctcttttaatcactttaatttgcaagtctgcttctgaagcaattttcatatccatcttagcaccagtctccttttgaatcagtaaccccatcatagcggattaaaaattcagattcaacctatatatagtagataaaccaacaaaaagacgcactgcaactatatgttgtgtgcgtctaattgtgtgcgatattttctttcgcccgtccttatcgaaatctacttcatactgcttaaaaaaagattgacatcatgcatctcgttttaatttcaaagtcattgcattaatagccacaacaattgttgagagtgacattaagattgcaccaactgctggacttaatactaacccaattccggcaaatagccccccagctaatggaatcgctaaaatattataaccagcgccccaccagagattttgcgtcattttgcggttagttgcgtgcgataaattcaagaaatgcataatatcgtttggattactcttcacgaggatcacatctgctgaatcgattgcaacatccgtcccagcaccaattgcgattccgatatcagcccgcgttaaacctggtgcatcattaacaccatccccaaccatcaggacgacttcgcctttagcttggtaatctttgacgattgcttctttatcttctggtttcaagttcgcttgaaccgtcataccgcccaattgtgcagccactttttcggcaacttgttgattatcaccggttaacatgaccggttggatatgccgtttctttaatgcttggatgaaagctggcgcttctggtttaatctgatcaccttgtgcgactagtcctaaaaccgtttgatcttgtaatagataactgatggaattccctttttctgctaaagtttggaaaagagcttgatcaaatttaatatgctgggcttgtaaataagttgccgtcactatttgataactttgccctgcaaccgttccagacaaaccgacgccttgaatcgtttgaacattgtctgcctgtaaatcaggaatagtttgtgcttggttatactctagaatcccagtggccaatggatgacttgaatggcgttctaacgcaccaaagagttgcatgagtcgttgttcatcaagtgctgtatcgaaaacttcgacagcattcactttgaatgcgccttgtgtcaaagtccccgtcttatccatcaaaacaacggtaaccttatctgacaattcgattgcttcacggttacgaatgagcaagccgtttgtagccgcaatcgctgtacttctggcaaccaccaatggaatggccaatccaagtgcatgcggacaagcaataataaagacggttaccatccgttcaaaagccgtattcagatcggccaagaacacccaactaatgaaggcgataatcccagcaaccaatgcagcatagaaaagatacttcgcaactttatctgctaacccttcaacttttgatttttcttgttgtgcttgtttaattaatttcatgacttgcgctaagtaaccactttcgccagtcccggtcacttgcacggttaacgtcccatttccattgactgtccctccgattacttgatcgccttcagccttcgcaacagcctttgattcacctgtcactaaggattcattgacttggctttgaccggcgataattaacccatccgcgggtactttttcaccagctgcgactaatacagtttgtccttttttcaagtcctttaaatcaaccgcgtgttgatgccctgcttgatcaattacttgtgcttggccgggtaacaaagcagccattttttctagagcactccctgcactcattaccgcattcatttcaatccagtgtcccaacaacataatgacgattaacgttgcaagctcccagaaaaagtccatcacatggccttgtgggttcaagaaatggttcgcaacaaaggcgtataaactatatagataagaaacactgatccccattgcaattaaggtcatcatcgctgggctcttagcagataattctccttgagcgccctttaaaaacggtgccccaccgtaaaagaagagaaatgttgctaaaatcaatactagccaatctgaacctgggaaagtcgtttgaaaaggtaactgcatgcccataaatggtgagagaattagaattggtaccgttgcaattaatgaaatccagaatttttgttttagatttcccatgtgcatcatatgaccaccatgcatcatcatatcgccgtcgcccatgtcatggtgcatcccatgcatatcgtgattcatatgccccatatcatgatccatcatctcatggtcatgatgcatgtcgtgcatgctgtgatccatttggtgctcgtgatgcatctctttcatatcgtgtccttcatgttcatggtgcatttcatcgtgtttcattttacttcctcctctatgcaatcacaattggctggtaaacaatcacattcaatcattgttggtgcactaggtaatttagccgctaacaccgtttgtaacgtctgaatatcattttgactgagcgttgtttgctcgattaaagtggctaatgtgcagccttttttcatcccacataattggttaaacagcgactgcgtggcatggttcatcgcttcatcttctgcgatattggccgtatatataaatcggcgtccttctttagtggcaattagatagtctttttttaccaaccgacctagcaaagtcttaacagtcgacgcttgccaatcacgcttttgctgaacgagttcaattaaatgactgctgttgacttgcccaagtgaccaaaccatccgcataatttcccattccgcatccgtaacaacccctattttttcagtcattcgcggttttctccctttcgtttacatttgtaatcattagttacagtttacatttgtaatcgataactgtcaatcttttttgctcatccaaattttacgcacaaaaaaagaccgccacagtgggcggtcttttaccatttaattaaagattttgcataaaatcttcaactaatttttggttttcttcattacttatattcacattaacagcggtttcaactaaatcagttaattgagttgtatctaaacgtttcatcaagctccgaacccgaaggaccgaagttgcgctcattgaaaattcatctaagcccattccaacaaggagtggtgccatgactgaatcgccagcggcttccccacacattccagtccacttaccttctttatgagaagcgtcaataacgttcttaattaaacgtaagattgctggattgtatggttgataaaggtatgatacacgttcattcatccgatcagcagccattgtgtattgaatcaagtcgtttgttccgatactaaagaagtcaacttccttagcgaattgatttgccaagacggcgctggctggaatttcaaccatcatcccaacttgtaaatcatcagaaacagtttgaccatcagcaattaatttagctttttcttcttcaagaatgccttttgcttgacggaattctgcgacagttgcgatcattgggaacatgatacgtaacttaccgtagtttgaagcacggagtaaagcacgcaattgtgttctgaaaatatcatcacgatctaaactaatccgcacagcacggtagcctaagaatggattcatttcttcgggtaatggcaagtaaggtaatttcttatccccaccaatgtccattgtccgcacaacaactggtttaccagccataccttccaaaacagtcttataagcttcgaactgatcatcttcactaggtaattcagatgagtccatgtataagaattctgtccggtataagccgattgcttcagcaccgttatcgataacaccatctaaatctttaggtgtcccgatatttgcagcaactgtgaatgtttttccgtcttttgtaacggatttttcattctttaacttttcccattctgctttttgatcagcgaaagcttgcgccttcttatcgtattcagcaatgtctgcatctgtaggattgataataacatccccgttaatcccgtcgacaattaattgttcgccggctttaacagaagttgtgatattttcagtcccaacaattgcaggaatttctaaagaacgagccataatagcagagtgagaagtccgaccaccaatatcagtcacaaaagccttaacgaatttaccgtttaattgggctgtgtcacttggtgtcaagtcatgagcaatcacaattacttcttcatcaattaacgctgggttagggagtgttacccctaataaatgactgagaactcgcttagtaacatccttgatgtcagcagcgcgttcttgcatgtatgcgttatcagtcatagcctcaaaagtggccacgaataaatccgcgatctctttgagcgcttgctcagcattaaccttgtcatcattgattttaccttcgatagcgccggtaaattctgggtctgctaaaatcatcatgtgggcatcaaaaacttgtgcttcttcttcccctaatgattcagcagcaatcttccgaatggtctctagatcactcgtggaagcttgtaaggcattatgcaaacgattaatctctttttctgaatctgaaatagttgatttcgaaaatgacaaatcgggttgcactaacatataggctttcgccgtagcgataccatcactggcagcaatccctcttagttttgtcattattcagataaaccttcctttttcattgtttcttcaattgcgttgattgcgtctgcttcgtcagcaccttcagctgagatagtaacgtcagcaccttggccaacaccgagtgacataacacccatgattgacttcaagtttacagatttacctttgtattctaagttaacatctgagttaaatttgcttgctgtttgtactaataatgtagctggacgtgcgtggatacctgtgtctgctactacgtgaaaatcgcgtttttccatattaatcgatccccttttatctaattatagatttagtttttaacgaaatgagtggtcactagtagtggctacccttccgatatttaagattaccattttttttaaaatactacaacagtttcgctaacaaaattagtagccgtctacactataccgctttcagacttgcggtagattaccgcaccatttcgttgtgcttcgcccacaatttcttttcgatggtcatagttgacccatactttctgaaaatctaaaaattcggactgagcaacctcaatctcagtttgttcgttatttattaaggcatccatctctgctaaaaaatcacgcatctgccattctgcctcctttgcaattcttttatcgtggcttgaaaaattcgttttcattccatctgcgaaataaaacgatgacctcatactaccgcataccgcccatacctgacaagaaacttttattttcgagttgcctgacttgcaactttttttagagatgattataatttggataaaggtcaaagatagtcaagaacactttgacgattctattattaatgaaaggttgtgacagattaatgctttgtcaaaactgccagaagaatcctgcaacgattcatctctatacaagcaccaatggtcaacgacaagaaatcgatctttgtcaaaactgttaccaactcttgaaacaacaaaacagtaatggccaagcaccacaagggcaatatgcagatccatttggctttggaagcctggatagtttcttccgagcaatgggcgcaactcccgatgatcaatcacaagcaaaccaagggccacaaacccaaagtggcggccaaggtggcggcaacaacgggcaaaacggcgaaagtctgctcagtcaatacggtgtaaacctaaccaacttagctaaagctggccaaattgatccagtgatcggtcgcgatgctgaaatcgatcgtgttattgaaattctaaaccgtcgaacaaaaaacaatcccgtattaatcggtgaagctggggtcggtaaaaccgccgttgtcgaaggcttagctcaaaaaattgccgacgatgacgttcctaccaaacttaaggataaacaagtcattcgcttagatgttgtttcacttgttcaagggaccggtattcgtggtcaattcgaacaacggatgcaacaactgatgactgaattgaagcagaataagcaatacattctcttcattgatgaaattcatgaaattgtgggcgccggtaatgccgaaggtggcatggacgccggtaacgtgttaaaacccgccctcgcccgtggtgaactccaactagtaggggccacaacgaataatgaattccgacaaattgaaaaagacgcggccctcgcccgtcgtctccaacccgtttcagtcaatgaaccttctgttgacgaaacagtccaaattctaaaaggactccaagataaatacgaagcctatcaccaagtccactacacagacgaggcacttaaggcggctgcaaccctttctaatcgttatatccaggatcgtttcttaccagataaggccatcgacttacttgatgaaaccggctctaagaagaacttgacgattaccgttgtcgatccaaaagaaatcgaaaagaaattacaaaatgcggaagctgaaaagcaaagtgcgttaaaggacgaggattacgaaaaggccgcttattaccgcgatcaagtcacaaaattgaccaagatgcgcgaaacaagtgccattgaccaatctgaaatgccaaccgtcaccgacaaagatatggaaaaaatcgttgaagaaaaaacccacattccagttggtgagttaaaggcacaagaacaagcacagttgaagaaccttgctgaaaatcttgaagcgcacgtaattggtcaagattcagcagtcgataaggttgcccgttccattcgtcgcaaccgaattggtttcaacaaatccggtcgaccaatcggttctttcctattcgttggaccaaccggggtcgggaaaactgaattagcaaaacaaatcgccaaagaacttttcggtagcacagatgctatgattcgttttgatatgagcgaatatatggagaaattcagtgtgtcaaaattgattggatcacctcctggctatgttggctatgaagaagcgggtcaattaaccgaacaagttcggcgcaacccatacagcttgatcttactggatgaagttgaaaaagcacatccagacgtcatgcatatgttcctacaaatcttagacgatggtcgtctgacggattcacaaggacggacggtcagcttcaaagacaccatcatcatcatgacttcaaatgccggccaaactgatgccgaagccaatgttggtttcggggcaaccctttctggtcagacacactcgattttaaaccaactacaaaactactttaaacctgaatttttaaaccggtttgatgatatcatcgagttccaaccattaagcaaagaaaatctcttgaagattgtcagtctgatgctcgatcaaacaaatgcgatgattgctgaccaagggttaaacattgccgtaactgaaccagtcaaatcacggcttgtcgatcttggttacaatccagagatgggtgcgcgtccattacgacgtgttattcaagaacaaattgaagatcgcgtggctgactattatctcgatcacccagaacataaacaattgacggctcggttggtggaagatcagattcaaatcaccgatgctaaagattcacaggtcacagattaaaaggctttattatctcaagttaaaacgaattacgtgccaaatgaagcgttttcagttatactagtggtaagacttaaacatccagggagtgatttagatgcgcttaatcaatgtaaccaattcttataagcgacttgtttcacaacaactcgctgcaacagccgcaacctacgttaaggtttattcacttggtaaaacaacggttcttgactcgcgttcatcgaaggaacgtgagctccttttaaaaaatgatcatcgacatgtccaacaagccgagatcgattttgtattgaaggaactcgccggtttagattccacagatggccttgaagtcttgaatgatggtccattagtcgaaattacaattccaacaccttcaaaaacagtgagttaatcattcgaaccgccccgacatttcattttgttggggcggttttttacataggcaaaataatggcaattgaataggtcgtatcgtataataactttcaacctaatttaggaggattaatgacgcgatgaagacttttcaaaaagagcaccaaattatttgccggttagaagtgggcgacgaaatcctaacagaacttaaatatttggccgcaaccttccccaaccaactgggaactatcacggggattggtgcctgtgatgaagttaccgtcagcgtttattcaccagaaacggatcaatatattgccacttccagtcaagagcaagtagaactgctggcccttagtgggaatgtcgaaaatgcaaatggcacgattgatgtccatctacatgcaagctttgctcgtttagatacaagcgtttttggtggacatctagaacgcgccgtcatttcacgtacaggagaattaatcgtttccttaattcccgtttccatcggccgcgtcacccatactgcaactaaattacaagtattagatatttaaacgattagaatcactgctatttttgcaggggttcttttttatgcccacttgacgcattaattatcaaccacactttttgtaatttatgatagactagtagtaataagtaatgcgctacaaggagtccgtatgaatctgattaacctgcttcaatcgttattgaaatggcgcccgaaaaaagcagctcctctaccgaacagtcatgtacgccaaactgtctctgagcaagagcccatccgtcaagcgcctcaatcgtcacagaaacagccggtcgttcccgttagtcaggacgcaacgccactgctggctacgatgtccacacaaccgcgccatagcacagttaccattcactacctcgatcatcatcgggtccctttacgaccaacgatgaccctgacaggtgaagtgggtaccgtgctcaatttgccatggctaaaatttgccggttattacttggcagctattaccaatttaaaacaacagtttcctgaagaaaacaccactatctggcttttttataaaccgcaactcgcagcaccagtaatggtgttacaccagaatttagaaggtggcttgttgattaagccccaatttttatcaggtgctttgaacgaacactatcaagccaatccactagaaggtggtgctaacttcgtgcaccacacctcagctaatcagactggtcgctttacaactaagacacagtttgtccattttaaatatgatccgctgaatttaaaacacagcgatgcacctgaacagcccttcatcgaacttcttgagccaacggatacctatcagcaaccaagtgaagaagcgctgactgctgctcgcttgccaaagcacgcggtttggaagatttatagctgtgcaactgctccatctggcaaacaatggttcaatcttggcagttcttggattacccctacgcgttatcaattacatgccactaatcctaaaggcagtgatgaatcataccaagtaccaaagttcacctaccattacgcagttatcgaaacaacccctctaaacctcagtgcaagtctgaacaacaataccgtaacattttggcaagcaccgtatgaccaacccacaacatatcagatagtgcctaaaacacgggtagtcgttaagcaagtcgttgtactcgataatcaaagtcgctggtgtcaacttaaaacaggtcaatggttaatggaaggcctcctaacttttgactaaataccccccctaaaaaaaataagccgccgattcagacaacagttagtgtgtctgaatcggcggcttatttttgtttgactctttatattatagttttgcggttaattcaacgtctggatacttatcttggaaccaacgttctgcaaattgattttcaaataagaacaatggttcgtcatgaatatcttttaccaatagatttcgtgaggatgacatccgttcatccaattgttctggattgatccaccgcgcagttcttgaaccgattggatccatcaatacttcagaattatattcgtgttgcatccgatattggaacacttcaaattgtaattgaccaacggcgcctaagatataatcgccagttgtgtaagtcttatacaactgaatcgccccttcttgaaccaactgttgaatccctttatggaaggacttttgtttcatcacgttcttggcagtgacgcgcatgaataattcaggggtaaattgagggagtttctcaaatgaaacagcctctttacccgtgtgaatcgtatccccaatttggaaattcccggtatcatataatccaacaatatcgccagcaacagcgcttgtcacttgttcccgtgtgtcggccatgaattcagttgaattgttcaaccgcatcttcttgcctgttcgcgtcaatgtgacatcaattccgcgttggaattcacccgaacaaattcgtacgaacgcaatccggtcacgatgagctggattcatattggcttgaatcttgaagatgaaccctgagaaatcaggagaggttggttcaaccaacgtttcttcttgtgttttgtgtgcttctggggcaggcgctaagttaacgaatgattctaagaacgtcttaaccccaaagttagtcaaagcagagccaaagaagattggtgtttgttcacccgttgcaatcttatcagcatcataggcattgcctgcttcaccgatcaattcgatatcatcaagggcttgtgtgtaaacagaatcttctttcaatggattatcaccggcaatccgacctgcttcatcaagggccaaataagggttggcttcgtcttctggtcgataaagttcgattcgacggttggcgatatcataaaggccacggaggtcttttcccatcccgattggccagttcatagcacagccttcgatgtccaatagttcttccaattcagcaatcaaatcaagtggttcacgaccatcgcgatccaacttattcatgaaggtgaaaatcggaatcccccgcattttgcagactttgaataatttcttggtctgtggttcaatccctttagcagaatcaatgaccatgaccgccgcatcaacagccatcaaagtccgatacgtatcttctgagaaatcttcatgtcccggtgtatccaaaatattaatccgcttgtcgtcataatcaaattgcatcacagaactggtaacggaaatcccacgttgcttttcaatttccatccaatcggacttggcaaattggccactctttttccctttaactgttccggcttgacgaatcacgcccccgaaaagtaagagttgttccgtaatcgttgttttaccagcatccggatgagaaataattgcaaaagtacgacgacgatcaaccgccgtttttaattcagtaggtgtcattataaaatcctttccgttattccaatataatgcgcttgggacaaagaattgcgcaaccattgcgtcaccctttgtcccattgattgtgctcatttaatttagtcgacttcttctggtgcatcggtctctggttctggtaacgttaattgtaaatcaatcaaccgtgaaccggaaaccgaccccgtcgttaagctcatgccacctggcagctcaattgtttccggatgaccactgactggaatggcaccaatttcagtaatcacgaacccggcaattgtatccacatcagtgacttgaatatctgtattgaaggcactgttaaattcattgattggcatacttcccataacggtgtaatgctgcgcatcaattttttggtacaattcttcagctttatcagattcatcatcgatttcaccaacaatttcttccaataaatcttcaatcgtggctaagccaacaacgccaccgtattcatccaacagaattgccatttgttgctgtgtacgtttcatttcaaataataaatcatcaattgtaatcgtttcgggaacaaaaagaggttctttcattaccgcttcgatttgcatggcctgaaaacctttttggcgtgcttctttcaagagattcttgatatgcacgacccccaccacttgatccttatcatcccgataaaccggaatgcgggagaatggttgggctaagatggcatcgatgttttgatcgttgtctgcacaaatatcaatcataaatgcatcagtccgcggtaccatgacttcgcgcgccatcttcttattgagggtaataatcccctctaacatttcgtattcatcggtttccagaacaccggcactcttcccagattcaatcatgtggaccatttcttctcgggtgagcttcggttctgtttctgaaaaatcaattggtgtcaacttcattaagagcgaggtcgacattgatagcaaccacacgaatggtcgcagtaagataccgacgatccgcacgggttgcaccgttattttagcaattgcttctgcacgatgcagtgcaacttgcttaggatataattccccaaaaaccagggatacataggataagacaatcgtcacaattaatacggccgcttcctttgtccaagccgcatttcctaaaaggggtgctaatctacccgcaatggttgtggcagcactcgctgaagataagaagcccgcaaacgtaatcgcaacttgaattgttgctaaaaactgattggaatgacctaagacttgaactaatactcgcgccttcttgtcacctttattggcttgctcctccatcttcacacgacttagtgacacaagtgcaatttctgccgcagcaaaaaaagcattcactaaggtcaaaattaatatcaacagtaactgtccccacaccgaacttccagggtcaggattcatcgtcacatccactacctttcattatctaaataagtacatttagccgaatatggcctaccttgcagtatagcatagtcaaaaatggaaattcaacctgcatcttttaaaggtcggtcctttttttagctttagtccgtaacgcttgaatatcatataaataagtaatcactgtcttggtaacagcataaaacggaatcgctaaaatcatgcctaaaatcccataaatattcccagcgaccaacaagataatgatgatggttagcggatgaatatctaatgaacggccaatcacgttaggataaatcaagttcccatcgatttgttgaacaacaatgacgacaacaatcaccatgattgttttgggaatcgaaattgataaactgataatcaacgcgggcgcaatcccaatataaggccctaagtatggaattacgttagaaacgccagcaataaatcctaacaaataagcgtatggcatcccgataatgagataaccgataaatgtaaagacgccaacgaataaacactctagagcttgaccaccgatataagctgaaatcgtcgcccccattttccgaagcaagtccgccacttggtcgttataacgatcaggtaacatcttttgaatattaggcactaaacggtgtccgtcttttaacatatagaacaacataattggaatcgtgaagacactaactgtaacgctcgtaatcgcaccaatcatactaccaaaactagatgtgaaactcttcataactttttcagcaatcttcgatggttttaaatctaactgattgacgtatttattgaagtcaatgtttttcaagcgcggattgctagataaatcatccgctactttttgcagtcgatgagcaaaatctggtaggttcgtcacaagctgtgtgatttgtttaatcaagttaggaatcacagtggctacaatgaaaattaaaccgccaaaaaagacgatgaagataatcgtaatcgcccagttgcgtgatattttgagtttacctaacagattgattagtgggttaaacaggtaaaataatagtcccgcgccaataattggcccaaataaagttgaaataaaggtgccaattggatcaaataagaaactaattttggtgcaaacaaagattaacacagccaaaatcaaaagctcaattgaccaaaataatagttttgattggcgtaaacgatcaaacatgcagtatccccccagtgtgcctatgtcacacaaaacgcattttatgctatcatagtgtaacgattattgttattgtaccaaattttatagcgatacacattgattattccttttgaagaggtggttttttaatgttagtgaaacaaactcgtgatttaaaaagtacggtttatcaagatagtttggcaattcggcaagccgtattcattgttgaacaacacgtgcctgctgaacttgagattgatgaattcgaagaccaagcgatttattttgtcggctacgttgctgatcaagccgttgtgacgttgcggctcatcgaagcggactcagattatcatgttcaacgtgtcgcagttagccgttcagcacggcatcatggttatggtcaagaactgatgcgtgccgctgaagtttttgctcgggaatcaggcaaagcaacgctcactttaaatgctcaattaagtgcagtaccgttctatacgcaacttaattttcaagcaaccgccaaaccacagttcctagatgccgggattatgcatcaagaaatggttaaaaaattaactgactaattgtcatttcaccactaaatgacttataatgaacacagcttaataacagaaaggacgttaccatgcctaagcaaaaatcacttcttgtccacttatttttcttcattatcccttatctactcgtcattacgattgccgcaacggcttacgacagtcttgtgattcacagtgccacttgggatcgcaccttgttcagtgctctaatcagcagcaccctaatgttatttattaaagttccaatcgaacgaccgttgacgattatggctgacttagcccctaaccaaacacttaaaatggtaacaagtttcttcctagtagaacgttcacttggtattaagattgctaacttcatttttgatggcattcttttctgccttgcaacctatctgttacgccacttcttaccactcaacatcattgctggtagtttactcggctggtgcgtcttcgcgcttttgctatccatcagcatcggtgctggcatcggctttaaaacattaacgattcaacaagatacttcagtcgaaaacgattaacccatacaaaaaagctccagtcaatcaatgactggggcttttttgcttgagactaaatagtgttctaacgacggtgcgccaattcttgataccggttataccaaatatcaatgtattccttcgaaaagggccctttgccattgttgatccaatcaaccaaaaccttaacgttggcttttaaaatccgatcagtttcggcggaataatgccattgcgcactgtgcgcttcatattcatcgacatctagaagccgtttttcgccattggggaaaaccttcacatctaaatcataatcgatatacttaagcgcctcttgatccatgacatgcggcgatgccaaattacaataataagaaacgccgccctcacgaatcattgccaccacgttaaaccaatacttcttatggaaataaataagtgccggctcccgcgtgacccactttctgccgtctgactctgtaactaaggtatgatcgttacaaccaatgactgcgttctcgctggttttcaaaaccatcgtatcgcgccaagtgcggtgtaaactcccatcgtgtttataactttgaatcgctatatagtcgccttctttgggaatactcatcgacatacccagctttccaaggttattattcataatcatctatcattatagcaaagactcgcaaatttacctaaaactttctaccattaattggttgccaaacgtgccgctaacttcttttgcacagtcggtaatgcaacgtcagctaattgtgcctcggtataccattggcctgggaaaaaggcgaggtcggcatctgctgcaagttgtgcttctaaaagggtaatcgtccatttaagatgtgtaaaaacgtgcaccacgggttttaaacctgattcatgtaattgctgcaattctagtgcaaaagcctctttaaaataagcttcgatacgagctagttgttcttccggtgtcaataattcatcgtcagttacttgcaagtcttccgcagcgactagtggataagtggacaggttcgctaataaaccggtactcggtcgtttttgaaataataagcccttttgcgagcgaatcacaactgcaaacatcgcaactagtttttgttttgctttcttcgtcttgactggataatccaataaggtgccatcttgataactccggaaaaacggtgctaacgccgtctcaccaaccgttggattctttgccgtacaaacttgcgagccaaaatccatcacggcttggttaaagtcacctggacgatctttgggaatcagcggtaaaatcgcatcgtaaaaaatgtggcggttctttgggttggcaatatcagcatcgattttcaataaccgactgaacacccgaaaagcattgccatcgattgccgggacgacttcgccaaaacaaatactggcgatagcgcccgctgtgtacggtccaatcccggctaacttttctaattcagccgcggttgttggccactggccattgtagtcgtcgacgacttggcgcgctgctttttgtaagttacgcgcgcgcgaataataaccaagtccctcccacgttttcattaataagtcctctggagcggccgctaagtctgccaccgttggaaaagtcgccaaaaaccgttcatagtacggaatcactgtttgaacctgcgtttgctggagcatgatttcagatagccagacacgatagggctcttgattctggcgccaaggcaagtcccggcgattttcatcataccaagtcataaacgcggtttgaaacgcgtcccgttcactcggtgtcatctgatagttcttgttcgtcgatgaagtggttgattgcatcaatattaaatcctttccgatacaacgcttgttgcatcttcatccggcgttctcgtggttcgagtaatcgataacggcgccatttttttgcaccaagttcagcaagcgcgtcagcttcactatcttcatcggcttcaagggccaacgcttcaataattaaactaaggctgtcaccgccaaaccctttttgcattaaaccttgtttgactttttgctgctgttcaaagaatgaactatgacggtatttcttcgccaacttcttagcagctgctaacccaaccgcaacttgatcatccactgaataatgactaagtgcttgatcgatatgggcagcactaacacctttttggattaatttctggcggaccactttggggcccttatccgcggtattaatcacagtacgaacgtagctatcggcgtaatcctgatcgtcgatataatgtaactcgcgtagttttgccaagctagtctggatcccttctggagtgatctcgtgttcgcgtaaatattgcgttagttccttttccgtccgcaattggtgactcagataattgagcgccaattgataagctttggcattatcatcgtctttttgaatgtcgcgttgcagttgactatcaatctctaaatccttcgctaaacggtatttaatcaagacactctcggtcacgccaaaagcgaattgctcatcgataaaaatattataacggcctgattttttctgtgccgttattttggtaatcttcggcatgttattctcccttgttacgtgttgctttgatgtttaaatagactttaaatccaatgaccacgacggcgagcactaaagtcccgatgatcagtggtaagctcttgtgttggaaggcataaacgccaattccgagtacaatcagcatggcgattaaaaattgatttcgttcccaaaaattcatgtggcttcgctccttactttgacttcctgtagcatagcataaatggcgcacccggacaaaagtcactgcctaattcccactattgaagcgatttttcagtgctaagtctgttatactgaatgcaatgagaaaaacgagtatcattattttatattaataggagcggattaaatgccagaacaaacaaaccaagtcgaagtcggccaacgttttccattgacgattaaacgaatcggcatcaatggtgaagggattggctattacaaacgcaaaattgtctttattccaggcgcacttcctgaagaagtggttgtcgcagaagtcaccaacgttgcccctcgtttcattgaagcaaaagtccacaaacttcgccaagcttcaccacaacgggttacccctaaggatgccacttacggccaagtcggtgggattgagcttgaacacttaagctatcctggccaacttgccttcaaaaaagacgtcgtcgtccaagcgcttgaaaaattcaaaccacaaggctacgccaaatacaatattaccgatacagtcggaatggaaaccccctggcattatcgcaacaaagcacaattccaagtccgcgaaatcgacggtcatttagcagctggcttatacgctccaagtagccatactttaattgatttgcctgaattcgcaacccaaaccgatttaacaatgaaaatcatccgaaccgtcttgaaattagtcgaatcactcggaattcccgtctttgatgaaactaagaatgctgggattttaaaaacattggtcgttcgcgaatctttttcaaccggtgaagcgcaactgaccttcattaccaactcccctaaactaccgcaaaagcacgcattgattacagccatccaagctgaattgcccgaagtggtttcaatcatgcaaaatatcaacaaagggaaaaacgtgctcgtttggggcgaccaaacgattcatctggctggtcaagaaacgattatggaaactttaaacggcgttcacttcgaattgactgcccgcgcctttttccaattgaatccagttcaaacggctaagatgtataacttagttcaagatgcacttgatctcacacctgaagatcgcctcgtcgatgcttattgtggggtgggtacaattggcttgagtcttgccaatcaagtcgcagaagtgcgcggcatggacacgattgccgattcaattgaagcggctaaacacaacgcagccatcaacgacattcaaaacgttgaatatgccgtaggggctgccgaagacctcctcccagaatggttggataatggcttcgtcccaactgccttggtggttgatccaccacgcactggcttagatcaaaaattaattgatgccattttagacagtcggccattgaaatttgtctacgtctcatgcaatccatcaacccttgcacgggatttaaaagccctcgtgcatacgtaccaagtggaaaaaatccaaccattggacatgttcccccaaacggcacgagttgaagcagttgtaacattaacactaaaacgcgacctataacgcaaaaaagcggtccatcaacatgtgtttgttgatggaccgcttttttatttggactttaatcgcctaaacgcgttctataagtcatatccttccggttaaccctgaatggcaaacgattgcttgaagcaatccttcaccattctgtgttaatcctcaggatatacccgacttatgccacactctcattttttaatgctcagaccgtttcggttgtgacgcactctttttgaaacgtgctttcacaaccactttcttccgcttaacgccgaaattaacgtccatgcgcgcccctgattgcccgatgcaaaacgggatgcaaacccgttcaataaccacaatacaactgctccacgaccatttaacccaacatcccgataacgccgtacactaagcgccaacgttggaataaacgtgagtaccccaagcaacccgataacgattatgtacagcactaatgcaccgctcatcttcagttgcacctttgcagcttgtgcaaatagcaaagcgaaaaatggcatgaaccaaacaatcattaaaatcaacatcgcccaccaataacccgcacgtgttgttcgccccgtaaaatcaaaataacctttaaaataatctcgccaagctgacttaaacgttacttgccctggtgtttcttgaatctcgcgcattgtgaatccccttccaaaactgattaacttaattgtacagcatttcaccactaatttgatacaataaagaaaatcaacttggaggaattcttatgaaaatttatttcgcaaacgctctattctcagcagcagactttgattataacgctaaggttgttgctcaactgcgccaatcgattcctggtgtcgatatctatctcccacaagaaaacgccgcaattaatgacaagaatgcttatgccagctctgaaatgatcgcacaagccgatacagacgaactcgttgctagcgatctcgtcattgctgttttggatggtcctaccatcgatgttggcgttgctagtgaaatcggtgtggcatacggtcgccaaattccaatgatcggattatacaccgacagccgccaacaaggtgctacaaatccgcaaaaactagcagctttacaagagatcgccgaaaaccaattccattacttaaacctttacacaaccggcttaattaaacaaaacggcacgattgtgaataatttagacgcgttgattgaggcagtgcaagcccacgcctaattaaaaataaagccattcatttgttatctatagtgaatggctatttatattgtattttgagcataaaaaaaaggattcaagctttgatatgcttgaatcccctaggttgaggttgatagcttggttgttacgagctgattctgttttacattctggataatgttacacctcatactttattcaattgtttttaatcgttggtctagcccactgctaatcgtttcactcgatctagtttggtcgtctatctttgacccgcatgtgcagttttagcgatgacgattaaattcgtgtttactacttgagcgatattctttaacagacatcagcctccgatatacttagatcttaatactacgaagagttacacttatgtttccattggaaccacgccttgcaatttctttttcgtactttaaatcttgatgtgtcgtacattcaaatctggtgcttgtgttttaaagtggtaaatctatttaaagctaacttggtttcacttaccaagctatctttcctcaccattaatatagcaccttctgtgaccggatacaatcaaaatgctcttaaatttaaaaaagtttttccatcatttctgacttgttatttttatcagaaatagctaaaaaaactgccattaacaatactgttaatggcagtttttaggatacatagctgtttttttattaatctctaacttgataattgcgttcgtgttccttaacaccttttaaaatgattggcgcgttgtccattgccaaatcaatttcatattcgctaccgtcttctggtagttctgcttggaattgattctcgtattcagccatcgtcaattgacgtcgtgcagcaagcattgctttgtggtccgcaccggctaattgtttttcaaatccgggttgcaaaataccggtgaagaattcactgattgcacctgaaccgtaactgaataaaccaattcgatcgccggctgccaattgcgttgattgttccaacaatgaaaggaagcctaggtataacgcgccagtatagatattaccaatttgacggctatacaatgtactttcttgataacggtctaataaatatgcttgttctgtttccgttgcttctggcaagattgtccgcaatgccttcaaccccatctttgtgtatggtaaatggaacgttaaggctttgaaatctgagattgtgcggccagtttgagcgcgatagtctgcccaagttgcttggaaaaattcgatgtattgttcagttgaatatttgccacgcgcaaaagcttcttttgaataattagggcgccagaaatcttgaatgtcatcactgtgaatggccgttgccggttctaacgccaacaaacgtggtgctgcactaacgatcattgcaaccgcgccggcaccttgtgtcacttcacctggtgtatccaaaccgtaacgggcaatgtcagaaccgatgactaatgctttttgctctggatgtgccgctacaaagtcataagcggtcatcaaaccagcggttgccccgtaacaagcttctttaatttcaaaagcacgggcattttttaatcctaataagcgttgcacataaagggcaccggcttttgactgatcgattcctgattcagtgcctaaaattaataaaccaattgaatcacgattatcatcatccaacacttcaagagccgcgttagccgccattgtgacactgtcttgactgaggggggcaattgccatttgatcttgaccaattccaattgtgtatttgtcaggatcaacgcctcgcgcgttagctagcatcactaaatctaagtaggtattaggcgtaaaaaggcccatcttatcaattccgatttgcataataatcttccaatctatttgttttcagcacgcagttgcgctaacagctcggtggctgttgctgtatttaaatgtgtcgctttcaataataatggtaataattgcgttaattcagtctcggttgcgccagcggcaatcgccaacgacttcgcttgaagcgccatgtgtcctttttgaatcccgtctgacacaagtgctttgagcgcggcaaaattttgtgctaagccaacagctgcgataatgccggctaattcacgcgcattctgaacttttaacaagcgctgattaatctgcacggttggtagaataccaatcgatccgccaaccatcccaactggcagtggcagttcgattcgaccgcgtagttgctgatcagttgtccattcccaactcgaaagcggttggtaagcaccctttctagcagcataactatgcacgccggcttcaattgcgcgccaatcgttgcccgtcgctaacaccactgcatcgatgccgttcataatccctttattgtgggttgctgcgcgcgccacatccattttggcaaagtcactcgccgcaatcatcttttcggcaattgttttgccagcaagcatcgcagttgttaaggtagctggatcaatcgtcacacttgcggtcaccacggattcaaacgcggcattggtcaaaacactcaataaaagggtgccgcccaactgttcttgaacagcatgtgcgatcgcttcacagattgtgttcacaatgttggcgcccatcgcttctttggtatcaatttgcaattcaagtttcaaaaagcggtcgtcaataatcgtcggcgtgattttttgaagaccaccaccgcgtttaacaattgatggatgcgcagcccgcgcaacttcaaataaatggtcattgttgccactaatccaagctttagccgctactaagtcaactagcttctctaacacgacttcaccagtcatcagccgcgtcagttgttcagtcacaaagccgccattagctcgtgccatcttagccgcattattagccgccgcgataacggatggttcttcgatcgcaaacgggacttgatagacttgctgattgactaataaatcttgcaccacaccaagcggtacttggtactggccaatttggttttcaatcatattaccagcgatctcatctgacaagggttctgcagctgctaaacaatcagcatccgtctgacttaggtgaccttgttcaacaagcgttgctaaacgttcatccttcgttaattgatagaacttaggctttttcattacaccatgcctcatttaattgaatttcaaaagcaattcctaaccccccaccaatacataacgaagcaatccctgttgtttggtgcgtccgtttcaattggtgcattaacgttgtcatgatgcgcgtgcctgaagcaccgattggatggcccaacgcaatagcgccaccggccacattaactttagcaggatcgacttgtaacccattttgaacggccacacttgaagcggcaaacgcttcgttaatttctaataaatcgatatcggctaatgtttgattttgttgcgctaataatttttgaattgcatcgaccggcgtgtaccccatgtaatctggatcagcaccgacttcttgatagccgaccaaagtggcttggtaaactaatccgagtgcagcagctttttccttgctcataacgatcatggcagaagcgccatcgttaatgccggaagcattggcaggtgttacagtcccatcttgttgaaaagctgggcgcaacttcgccattgcttcgatggttgtcgttgggcggataccttcatcttgttgtacttcaagcgttgctttgcgttgttgcaccgttacaggcacaatttcttcattaaaccaaccagcttgggtcgcttgcgcggctttttgatgagaagcgagtgcaaaagcgtcttgcatttcacgcgtaatgccgtatttagctgctacattttcgcctgtaatccccattggctggtgcgtaaacgcatcgtttaacccttcgctactgatgctatcaatcattgtttgatccccaaatttactaccaaaacgcatttgtttattcaaataaggcgcttgtgacatactttctgtaccgccaactaagacgatgtcagcatcgcccatgacgattgcactctgcgccaaccgaatcgcttttaagccggaaccacaaacttcattaactgtcattgctgtgcttgattgtgtcatcccactcttcaaagcgatttgccgtgcaacgttttgcccagaaccggcttgtaagacattcccgaaaattgcttgatcaatctgagttggatcaatcccggctgcttcaatcgccgctttagcagcaactgtccccaatttaaccgcgcttaaacttgcaagttggccccccaatttaccaatcggtgtccgctttgcactgataataaccacttcttgcataatatccctcttcatctataagtctaattattactataactaaattttcatgcaacgtctggtaattcacaatttctttaacttttttttagaaatccgcttggtaagctgagattattttaccattttatcggcatcgtgcattactcattagcgtaagtcattcaccggtgacgcttacaactaatctttaggaggaatccacatgcaaacatcatggttagcaacatcgatcgcttttgaattacaaaatacagactatccaaatgaaagtttacaacgtcgtatgaccgccgtaaaagaagacgttcaagccacggaaatccaagcagttggcgaagccctcgcaagtctccacgcaggtgacacatttgcaacagctactctaaccactaaatctgcttatatcgctaaataaaaaacataccaatctttgaggaggaattcaagatgaaacaactttgcttagaatttaaaaacagtgatgctaagagtcgtgtattgcgcttaaacaatattgatgacaacttagacgccgaaacagttagaagtgcgatgactaaaatcgcagcagccaatatgtttattaaaaaaggaattgaactctacaaagaaccagttggtgccaaatacgttgaacggattgaaacaccaatcttttctgacaaataattaagcagcatacagcccccaaatcgaatctgatttgggggctttttttgcgttttacataaattgattaacaacccttgtttccgcgataaactttggtgtaggcttacataaagtcgttcaaaggagttatcatgcccaatccatttaacttatcgcaaatattgcaatcaatgttgcttaattgtttactggtaattgcgctgccactagcttttgccgggattttaacactaatcaatcgttcaactaaacggcgcttagcccattggtgggattactcacaacttttaattggcggcctaggcactgtgattcatgaactcagccatgctgttgcctgtttaatcttccaacaccaaattatcgatatgcaactcttaaaattaaatctacgggataatcccgatcattcgcttggccatgtcaatcaccgataccatcccggccgtctttggccaacaattggtaatctctggattgggattgccccgatttttggttgttcagccgccattttcggactgacttggttattagcacgacccacttttgcaacgtggatgacctttgctgaacatcccacttggcagttaaacgccatcggtcccttattcagccagctctggacgacgcaaccgggtgctctcttgctctggttaatcttaactagcatgattgccatcggtggttatgacttatccgcagctgattttaaaggtacgattccagggattattgccacagtcatcgcggtctgcctcgttactggtctgttttcatttgtgccaacagtcaacaccacgacttggctcattggtgttctaacaccaatggcaattatcctaaccatcgccgttagcttgtcgggtgtttgttggctgatcattgccgggattttcgcactattagaaaggacgacttatcatgcgcgtcattgacttactacagctattagctgatacacccaaaaacgatggcatctacttcgaaggccctgaagagctccaacctatcgcccactttgagctcgccgtcgttgacgaacagccacgactattactgcagttaaaggccgcagacaaaaagccgctgaagcagtgggaatttagcctattattaaatcaaaaaaactactaccaacattatatgtatgtccaaacaaagacgggggactatcctttgtttggttttcgcgttgctgctgacaaaattctactcggataatgtttgttcaagttgcgttaaataacgatgactcgcaatcatttctcgtgcatcattttgatcggctaattgaatctcatagatcgaactggcatcaggatttaacaatggcaatacgcgggcccagtcaattttgccagtccctaattgcaacccatcatgcttcaaacccatcgaatcaaccagatgataatgaacaacgtgctcacgcaaagttgccagactctgcaagaaagcattctgatcaccctgcaacttgataaaacaatgactcgtatcaaacgctaagcggtaacctttatcaaagatggcctgatcaaaaatcggattgccataatagaaaatcggtgaaattgaattttcgaacataatattttgtccaccaatccgctgtaaataatcgaggcgcttgaacaaaacacgaatggcatccgtaatattaccgtaacccgtcgtcaattcttcaattggatcatcataagagccatgcaccaataattggacatcttcagctttcgctaactgcaataaatcgagtgttgattgccataaaaagcggtatcgggctggcgaacttgcttcattcatcgacagttcaatatgatgcccttcgaaactcattgggtggtgtaaaataattcgttcaacctgctgactgcgtacataacgaattttttcgcgtaagcgtactagcccagttggcgtgacatcttcggctgttaaatgaaattcaaaatacgttggctgatactgcattcgatcagcaatttgctgatcgttaatccctgcttttaagcctaatcgcatcgtaatccctcttttctctactagttcctatttctattctaacattctaaagacctaagaatcgtaaaagcggctcaccaagtaatggtgggccgcttttttggttggcgttaaacgtgctttttgaaacacacgctatgcatttagtaccttgttcaggaagtcttttgttctttcgttttgtggggtgtcaaagatttcctgtggtgtgccttgttcgacaatgtgtccatctgccatgaagatgacgcggtcggccacttctttggcaaagcccatttcgtgagtcacgacaaccatcgtcatcccttctttggctaaccgcttcataacggccaacacgtcgccgaccatttcaggatcgagcgctgatgttggttcgtcgaacaagagaatatcaggtttcatcgctaaggcacgcgcaatggccacccgctgtttttgcccgcctgacaaggattggggttttgcatcgaatttctctgataaaccaaccgtttcaagtagtttcttggcggtttcttttgcttctgccggcgtcattttaccgagttccactggtgccagtgtaatattttcagcgaccgttagatttttgaaaagattaaagtgttggaataccatcccgattttttcgcgaattcgattcaaatcactcttaggatcactgaggttgtacccatcaacgataatctcaccactcgtgggttcttctaagcgattcaagcagcgcaagaacgtgctctttcctgaacctgaggggccgatcatgacaaccacttcattatcaccgaccgttaagtccaaatcttttaacacttcgttactgccgtaattcttaataagatgagacacttcaattctattcattagttatctattctcccctcaatgtacttcgataaccacgtgagtaacgtgataacgatcagatagattaaggcaatcattgcccagattttgaacccttcaaggttgcgggcgatgataattttacccgtctgtgtcaattcgagaatcccgatgattgataaaattgacgtatctttcaatgtgatgatgaattggttaatgaaggatggaatcataatgcggatcccttgtggtaacacaacgcgccgcattgctttaccatatggtaaccctaaactccgcgctgcttccatttgtccggtgctaaccgcgccaatgccccctttgacaaaggctgcagtataagccccttcattgaacatcagcgtgatgaccccagccacaatcgctggaatcttctgcccagttaaacttggaatcccagtatagatgaataatgcaagcaccaagaggggtaacccacggaaaatatagatgaccgtatctgaaacgccacgcgcaaaccggttaggtaatacgccgagtaatccgaagaaaaccccgaaaatcgttgcgaagaaaatcgcaatgactgttaataataacgtctggcctaaaccgctcaacaacgcatctttattttctttcaataatccaaaaaagctgtgatcaacggttgcttttttagttgattctgtacttaaatattttgctttaattttgtcgtattgaccatttgcttttaatttagcaagacctttattgaatttagcgatgagttcaggattgctccctttcttaacggcaaatccatattcgccaccttgagcaggtttggtgacaatcttgagtttcaagcccgtcttaatcccatattgcataacgggctcgtcttcaaaacaggctgccgaattaccattcacaacatcattatacatattatctgaatcatcaaacgtaacggtggtaaagccatattctttcgctttggccgtcgcataggccccagcggaagtccctgttttaatcgcaacacgtttaccgcgcaacccttctaagcctttaatcttactgtccttttgaacggccattacaaccccggtcttgtagtaaggatcagcgaaatcgaattttgcttgccgttcaggtgtaattgtcatcccggcaatcacgccgtcaatttgttccgactgaacggcttgaaccgctgcgttgaatcccaacggtttaatattcactttaaagccctcggacttcgcaactgccttcatgatatcaatatcaataccgacatattgattcttctcattcgcaaactcgaatggtggataggtcacatccgtaccgatttcataagttttttcagcggcttgaacctgattattcacttgactcccaaatacaaataagcctgcgagtaaacagctgcctaaaaatacgagtaatttcttcatgtgatcctcccctaatgcctgaccaacttctctcatcgctcttaacgcgttattaagattagattagacgttttataatagtatgttaataattataagcataaaatccaaatttgtcgaattttttaccacaatattgaaaagcagactctaatccctaaataatcgcattaaaaaagcccgcagataaggcggactttcactaaatgagaattgaatgagtttattttctgctataatggaagaactactactcaaggagtctactatgattaaacccattatgcgtgacacgcaattcttagctcaaaaagcagttccagcaacaccagctgataccgatgtgctgaccgatttacgtgatactttacaagccaacacagaacgttgcgtcggaatggctgccaacatgattggcatcaataaacggattatcatcgttcaaatgggcgtcttacctgtgattcttgtgaatccacagattgtgcgccaagccaaaccttatcaaacgactgaaggctgcctctcattaaacggagaacgccctacaacgcgttatgaaacaattgaggtcacttaccaagaccaatcctttaagccgcacaagcaggctttctcaggctggattgcacagattattcaacatgaggtggatcactgcgaagggcttatcatttaaaacaacaaaaaacgttcaaccactccaatgtacggagtggttgaacgttttttacaggttatttattttcttttttagtgtctttttttaattcttctgccaagtcgataatgtatttcttcaagtcatctttcacttctgggtgttttaacccatattcgatacttgtttctaggtaaccgaacttgttcccaacatcgtgacgacggcctttgaattcgtgagcgaagacgcgttgggtcttgttcaattcatcgatcgcatcggttaattgaatttcaccaccaagccctggtttttggttttctaaaatatcaaaaatttcaggcgttaacaggtaacgaccaatgattgctaaatcactaggcgccttatcaacagctggtttttcaacgaagttcttaacgttgtataaatcatctttaactttgttttctgggttaatcacgccgtatttgtccacttcattatgtggcaccttcataacggctaattgtgatgcatgtgtttcttcatattcattgattagttgtttactcaatggcaccttatcttccatcaagtcatcacctaacataacgacaaaaggttcgtcagcaacgaatgattttgcaaggcgcactgcatcccctaatccgtttggatgtgattggcgaatgaagtacaagttaacccccatatcagtcgtttcgttgaccatcttcaacatagcggtcttattcttggctttcaagttttgttccaactctggtgctgaatcaaagtgatcttcaattgggcgtttgcccttaccagtaataattaagatatcttcgatccctgaagccttcgcttcttccacgataaattgaatcgttggtttatcaacaattggcaacatttccttcgccatcgctttggtagctggtaaaaaacgagtgcccaatccggctgctggaataactgctttacgtactttcatctgctaaaatcccccataacttatagtctaataacagtatgccataaaaaagtggatttgcaccaattatatgccgaaaatgaggaaaagattaacaagcacttaggattttatcaatcttttcacaattgttttgtaagcgattcccatcattggtattctcaagatgttaacaataaaggaggtcttcgatgtttctactacatcccaaacatgtcaatacatcccatgaatgtcttcctgtgccactcatcatcaaacgtggcattgattataacttctgtgagctggatcaatcgtcaattccccgttcttaccaaactagtattacgagtgacacaatggtgattattccctataaaaaatcgcaaagtcttgtgttagaccgcataaccggtctccaaattagtccgcgttctacccggcaactaatgcgcgcttataatcgccatcagatcatggacttctcacaaccccggtacctttgccattgtttcaattggtatcgtaagattccacacatcaatggcgaatatcagtatttaccattaagtggcacggctcatcaaaacgcaccgtggttagcgctccactacgtccgtgattacgaagttagcgataaccatctctacgttacattgctaaatgactgtacctgtatcctcccttataaaggccgtcaaatcgatactgaaattcatcaatgtgcagccattggcaaagtccaacttggctgtctcactgtgtgtgccactaatttcggctatcaaatcaagctcaagacttgtttcaagccaagcatcgtccatcgcttcgatgattgccattgccatctgtgctcgaatgttccgaaaacagctactgaactacttggattactcaacgcacttaaaatgcataaggaaaatttcatttaccaagccgtaatccatgaataccccgaattcagcgtatttgacattcagtgctatatcaaaagtgttaaagcactaattcaaaaattacgccaattataaattaacccgaagtcgctatttacaataattttcatttgtatttcaatgcatttgcgcaaattaaagctgaaacggattgatttaccgctaaaatcggcgattatccttctttatgcaaacccgctatagtgaacttaccggtaattcacactgtgagctcatagtagacaggatgcttaacaatgacccaatcagatttacaaactgcctttgattttattatacaagacgacaccctcatctatggtgttctcaaagatctccacgttccacggcagcgcaataactttgctgatctctaccaaattggcgtcatcgcctttgtcgaagcctacgatcatttcccaggcaatattgaagtcgaaacccaccgcttcatggtttatgcgtatcaggccgttaaatgggccattatgatgactttccgcaaggataataatcgcgacaaacgaattggtttcgttaaccgggcaaacgatgatgattcggtgatggactatctcgaccaggttgctgatccatactgtaacccagaagacgccgccatctgtaacgacctcttcgaacgtctctatcaagtctgtaccccacgcgaaaaacgcttcttagtcctccgctatttctacaatgccagcctaaaagaaatcgccgtggatctaaacatcacacggcgaacggctaataatattaaatttaaggtgcagaagaagtttagtgcgttattagtataattaaaaaaggtgagcaatcatatgattactcacctttttaattatactaatcgatttttgccataaatttttgtaatgcatcttgccaggttggtacttcaaaaccagttgctttaatcttcgtcaaatccataattgaatgtcttggacggaaggctttttggggatattcgtctgatgtaacaggactcacttcaacagctttgtccttcaagatttcacttctaaaactcgtcttaatatatttcatgattttttaccgttgaactactcattgatttgatactcttctaaaacaattggtatcgatttctattttgataatatgttgaactactcattgatttgatactcttctaaaacgtgaagcgttcccagaatcattaggagctagttgaactactcattgatttgatactcttctaaaacggaacggctgaaagataacattaatagtctgttgaactactcattgatttgatactcttctaaaacgtctaggtggcataaaaaacagttctgccggttgaactactcattgatttgatactcttctaaaacaataagcctaggtggtgcagtgtttaataagttgaactactcattgatttgatactcttctaaaactggttaacatattaaagacctccattttctgttgaactactcattgatttgatactcttctaaaacggagtctgtttttaataaattcgttggtaagttgaactactcattgatttgatactcttctaaaacgaatgttgagacacacaagaaactgattaggttgaactactcattgatttgatactcttctaaaactgacacgataataaataatgtctaaaagcggttgaactactcattgatttgatactcttctaaaacaatagcctaggtggtgcagtgtttaataacgttgaactactcattgatttgatactcttctaaaactagcggtcttggttttcaatctaccgatgagttgaactactcattgatttgatactcttctaaaactcttaacagtcacggttgcagtaccggcaggttgaactactcattgatttgatactcttctaaaactatcagccaggttattgaacgtgactttgagttgaactactcattgatttgatactcttctaaaacagaaggtgaagatggacgtgaaaagtgtaagttgaactactcattgatttgatactcttctaaaacaaacactcagattaatctggtcagacgttagttgaactactcattgatttgatactcttctaaaactcagggtacagtaaaaggtatgtgaaccttgttgaactactcattgatttgatactcttctaaaactagccaaccattgatctgttttttcgaacagttgaactactcattgatttgatactcttctaaaaccaatcgagcggaaaaaattataaaaaactggttgaactactcattgatttgatactcttctaaaaccattcatagctttactctcctgtggtttgtgttgaactactcattgatttgatactcttctaaaacagctggtgctacaggttgtgtcggagttgagttgaactactcattgatttgatactcttctaaaacaatatgcccaacccagaaaacgccccccgggttgaactactcattgatttgatactcttctaaaacttaaacatactgatcgaatgcctgaattaagttgaactactcattgatttgatactcttctaaaactgaaactacacgcagactagaagatgataagttgaactactcattgatttgatactcttctaaaaccatcgttttttcatcagaatttcattttattcatagcgccattcgacataatcattatcgatgtgataataataacatttctggtactgatcagatttaacctcttctgaaaattcaatgagaaagagtttcacattcaatgtcgccaccaacctcaccaattcattaaattggttgatactgagatagtgcgaaacgttgatcaacgtgattatttttgattcatttaactctactgctgtctgtactatactctcaattataccatatgggtcatgttggacgacagtcgaaaattgtaaattatagaacttaatcattctttgaagatcccattcctgattgacatctaaggtcaattcatacataaaggccgcatccaaaatcgttgaacgaatctcactatctaactgagttaatttctggcgctgctgatccgttaagtcggcggcgaattttttaatcaaccgattttgaaatagatgattcaaattaattgctgccacatccccaccccaaataacagcctttgaataatccattaattcgtattgatcattgctaaatttaacggtctcttgtgcgccggacattccaataatgagtttggtatacacttctggactacttgtactgcaaaccgttattttcttattctgaacgctaaaggggtggtatggataaaaagtaatgttcatagaattaacgtcctctcagcagaattacggacgtcatcactcgattcgcccactaagaaatgcattttattatattgttgctcagtaaccatcaacgtttgtactaagcctgcaggcggagtaaagccagcaattcggttctcgataaactgcgccgattgtttgctgacacaaactcgaacataaacagaatattgaatcattaaaaaaccttcgttaagcagcgcttttctaaaatgacggtatgccttgcgatcctcgctcgtttcaactggtaaatcaaacatgactaataagcgcattattcggtacctcgtgagtcattaccacctttacttcaaactcttctttcggagttgtcatgaatttcaaacaattctgtacgtgtttagtgagtgcgtttctaagaattgtgatctgtccattatattctagctcaagattcagtaactccactaaaccaaatttaacatcaggggttaattcattaaacttttgatgtgccacccaataatcaatcactggtcgaaaaggttccattagatcggaacccaaattaaaatcactgacgccattgtgatgatgaatgccaaactgtgttaaatagccattacaaacaatttcgcgattaacggctgataacaacaaactataaccataattaagggctgcattaatgggactgtactccgttcgaacaaagtctttatcaaaaactaactgaaaatacttgcgcgcaatcacggcttctcgatttgttcgatcagcaaataccattgcatcagcttctgttgttaagtcttcaatatcctttcctaacaattgtgcacattgaatttgcatcgctattttggcttgaataatcgccgtccataaggtttctttcaaccccgttccccattcaacctgttgctggatcgacgcgagactacgatttcctggataatccgcaattgtttcgcaagttggattaccgtctttgcctgtaaaaataatcttagcgccagcttcactcaactcagtaattgccgatgccgttaaaacggcctgggtagtcgcaactaacaaaatttggatatcatcaattggtacttggtgtgttgcatcttttgtctggacaataatcttccgtccagaataagaaacctttgcatgttgtgaaatcacaactgttcgccaactcataaaaatttaccccctacatccttgttttcaaaatgataacatgctataatgctgttgttgagcttgatacactcaatcgaaatactcattgatttgatactctgagttaaaatcaaacaaggtcttcggaccaagttttctattctgagcctcttatgaggcctttttttatgccttcaaaccaaaaagctagcccatcattacactaatgacaggctagctttatttatttataaatcccttaaagctactcgtcgttcgaataaaccggttggagattgatagataatttgggtatcagccgacagtgtaattcctgtggattgctgtatcattccaaatggcgtggtcattttcaatactttaagatcactcatcgcagcatttgcatgtaatccaattagaattctatccaatataacctgttgcccaacctgcaccatcttattaccatcccattgactcttccatggtaacttcataaaggctgctttacccgtagataatttagctctgaattgattagtatcatacagtgggaaatagtgcatcacttgatctaagatttcatcataaacttgttcagcgagttcttcagactgtgttaaaggtagcgcgccatttaataatttaacagccgttttatcgagaatcagttcctgctcgttgtgtttatacgtcgcagagcccaatgtcaattcttgaccattatcgaagaaacgttgattgattaggatatgtggtgcaatgacttcaaagtcttcgaccactttcacaatcgttcctttttgttttttcacttttgtaaattgcggactaattttttgctttaagaatgccttttgtgagtcttcatccgtcagttgtttaagttgcgctagccaacttgtctcaacaccacagactttatagagatcaccctttttatttttaatgcgtacaatacacatgtaggcaacggtcttccctgagtacccaccatagagtgcagttggtcgatcttgtttagcgggaatcaattgcttgccgccctgaccacttgctttatcatctttagccgcatagagcgtttgattaaatagtgctcccgaattttcatgcactccgcgggtcactagaatcttcttaaactgatatattttattcaagtaagctagaccggattctttatcccaaataaccgcttcagtattttcatcaaccaattcgtctttctttagaccatttaaaaaattaaagttacgccacttatcttgctgacttgccttctgatactcaccgtatacaaaataaggttttaatttaggatagcgcttcaatagatacagaccaacgaatgcggtcagataagcatcgaatgcatgatgatggttatttagattacgattcttcggaaaatcaaattccgttcgcatttggtgggttaacccactcttaaccgtaattaactcaatattgtcttcaccatattgttccatcaatagatttgtcgctaacttaatgacttggcgtgtttctactaattgccggttaataaaacccttcattgcgtatttactgatgtgatcaggatttaacgttaagttatcatattttttcttggtaattaacccagctcgcaacatctgttcccattgaatctgcatcttttgtccaagttcgacacttgtaaagtcggtcggtacttgatctgctttactacgattcattttttgagaaactaatacccgattatctagtgagttgtccttaataaacgattgtggcaaaatatgatcaatatcgtacgtcgataaacgatcaatattcaacgaatcacccgtatacatatcccgaccaccctgcatgaagtacaagaataagcgcgtattgctcaatgcagaattcgataaatccttaagttcatttctgatttcagtattatttagcaattcattgctgatattttgatagacttgttcaacttggcgcttacgttgcaccgaaagtcgtggattcacttcatcttcgcgcgcaaattcaatcaatatccgttctggcgcctggcctttcatggccttttgaatgtcattgacaacaagcagaatctggcggagcgcttttttattctgtggtgacgtatataaatcattgataacatcttgtacatcattttcagctagaatcatttgattagcttcagtaattaatttatcaaagtcttcagagtgcacaatccgcatgaagttatccgttgtatcccagagtaagtccataattcgttgtccattcgcattgacgatttgcgttaataatttagccgacaaacgaccccaaccgcggtagcgtttagcagctaattgcacacgttgctgatccgttaaccaatcgatttcattcaatttggcgctatatattttgccgtcttcaaaaatcgttgaccattcaatacatttttccaaatcggcttgtttatcaacatcatcaaccgcatctccaacaatcatctttaagtcatgatacgtgcttaatcgactattaaatttgttctcatcggatagaccagtaattgcgggacgacttgcatagcgcttttctgataccaagtaatcctgaatatttttcactgttacacttattttttgcataaataaatccgtaaatattgcttgtttcaactccgtcgtaatcggttggtcatcaatcttaagtccgtttaattcattcaacacttcaaaccgttgataaattaagctctgtttagggagtacatcttcagccaataaataagtatcagtcgttgtcatgcgcttaatgaattcattagcggatgcttgacggtccactttatcatcgaagttccacggtgtaatccggccttctgctttacgaatcatccacgcaaatttcgcatcggagctttgtcgttgctgctcagccgtaatcaggggccccacatagtatggtactctaaaggccactaattcgtccaatttatatttagcgactgtttgccgtttagaattgggattaagttccgctaaccagggatagtattgttgttggttctcaataatccggtctaattcctgttgatgtagttgatgcgggattgccccattatctttggtccgttgttttggcataaattgatcaagttcaattaattttttaatttcactcacaatcggatgatctgggttgttctttaaggcttttgtgatatctccgtaaaaatcttccttcgaataggccttcgtattttcttgaccatcaacatattggtcataagcctgctttaatctctgtcggtctccaggtgctaacgcttcccgtaccgcttttagcatttttaaatgcttttgatgatcgtcatacttcgtgatcatcgcttgcgacaatgattgattttcgggaacgattcccgccaatagaacaccagaataaagttcctgtaggctttcgataatttgatgggcattatcatcaagactactctctaacttgaccatttcttcatcaaagttttctgcattaaaagtgagtgtccatgctttaacatcttcggcttcgatcccagtaagcacattaaacttcgcttttaaccccaagattgcttttaataattctgtcgcaatcgccttattctgcttttcaactgccttattcgtacttggcgtataaatcagtgataatgcttgtctttgccgattgctagcactttgttgattatccaataagagcgctttgacctccgccaatttatccgtctctagttgaaagccagattcactgaacaagtcagcaaaaatcgtgtttagtctgtcaaaatgagccactaaattaatttcgctactcttaaaggatgagacgggcgcttcatttaaaaagtgcccgcgatacttcacaatatgatgcatcgctaaataaatctcgcgaatatcaaattgacgtttctcggtcattagcttatatcttaaatggtaaatcgttggataatcgtcatagaatgcccgatctgttcgatcattaaataaacttgtctgtggatataactttcgctgatccttcggacttaggtttgattgtttttgccgcaagaaaaaagtatcatcaaccggcgtgatatagggttcaaagatttctcttaacaatcctaaccgccatttacgtcgttttaatcggcgacgtgttgttctaaagctgcgccgttctgcggttgtttgtccttcatcgtataaacgaaccccataaccatatttacctcttacactgaccaacttactttggtcatcaaccactgaccacccaattgaactagtaccaatatctaaaccaatattatacggacgactcattcttactccccctaaaagtttatattcaatgatagtatatccaatttaacccgctttttccaattaagttaagaattacacatgctaacagcaaaaaaagacaagtcttaatgacttgtctttgatcattattcaactggtaacactgcgccgtgccatttattcttaatccattcttgcgttgattttgatttgagcgctttaacgagcttcttgatagctgggttattgcggtcttttttatttgtcacaacaatgttggcaaatggcgaagattgcttttcaagggccacagcatccttttcagggttgagaccggcttgcacagcatagttcgagttaatcgccactaaggtgccttcatcattcttcaaaagttcaggcatgagttttggttcgaatgtgtactcaaacttgaggtgtttgggattgctagcgatgtctttaaacgttgcgttttcagcatttacgcccgatttcaaggtgattaagccaccgtcttttaaaattgttaaaacacggccccagtctggctggctgcttgaaactaatactttcgcacctgatttcacatcactcaattttttaacttgtttactgtataagccgagcggttctaagtgaatactgccaacactgactaagtcgtagccgttatctttattggccttcttcaaaaagggtttgtgttggtagtagttcgcatctaattcgccactcgctaaagctttattgggtaaaacataatcgctgaagacttttactttgaggttgatgccttcttttttcaactccggttgaacgtgtttcaaaatcgcggcgtgtggaattgcggatgccccaacgacgattgtgttgctgtctgacttcgcttctttgttaccacaagcggcaagtgcgcccgctaataagaagactgctgctaataatcctaaactgtgttttttcatgaaaactcctccttttaaattaacgatgatcaatgtgttgaacaaccaagtcgcccgttttttgacaaatgaagacgatgattaaaataatgacggttgcgactaacgtaatcgcattttggttagcttggaacccatcttggtaagcaagatttcccagtccaccggcaccaatcacccccgccattgcggtataaccaacaagtgaaattgcggtgacggttaagccggaaacaagcgccggcatgctttctggtaaaaggacttgccagacgatttggacttttgaagcgcccattgaacgggtggcttcaagcacaccgccatcgacttcccgaaaagctaattcaacgagtcgtgcataaaagggcccggctgagatgattaacgctggaatcgcagctttcgggccaatcatcgtgcccatcaagccttttgtcaatggaatcaacaagacgattaaaatgatgaatggaatggaacgaaagacgttcactaataaagccacaatgccattcaacagccgattcactcgaccaccactcgcgtttgtttgataaagaactaacccgagtgcgaatccaagaactgccaccaataaaacactgacaattgttaaccaaactgtttcaaaagttgcttgccacatacttggccagttcacttgcttaaattgaaaataggattgaaatccgtttacgttatccatgacgtaccacctcaacttcgattgtttgttgtgctaattctgcaaggactgcctttaaatcacttggattagcttgaatttgaatgtataaatagccaagtgcgccattaatggtttgttgtaaactcccactgatgacactgatttcgactgctgggtattgacgcatcaagcgaccgatcaccggttgactcgattgttcttcgttaaatcgcagttggacgattgtgccatttggaacccgttctaacagttgatcaatcgaagcggccgtttcacttggcgacaccactaaggattcagcaacaaatgccttagttgcagccatttgtggtttttcaaagatttcgtgcacagtcccttcttcgattaaccgcccattttccatgaccgcaattcgttggcaaatccgccgcaccgcatccatttcatgggtgacaagaacgattgtaatccccatttcacgattaatcttagccagtaacgttaagattgaattcgttgttttcggatcaagggcgctagtcgcttcatcacataacagaatcttcgggtcactaatcaaggctcgtgcaattgcgacccgttgtttctgaccgcccgatagttcgcttggataggccgcttctaaatgggtcaattcaacaatctttaataatgcgcgggctttgatttgtcgttctgccttaggtaccccggctaattttagtggcaacatgatgttttctaacactgtctttgaccagagtaagttaaagtgttggaaaatcatgccaattttctgccgaatcggccgcattgcttgttcgctcaaccccacaattgactggccctcaacgagcacatccccagtcgttggcttttcaagtccattcaagagtcggatcaacgtactcttaccagcgccggaataaccgataatcccgtagatttcgcccgcttcaatgttcaacgagacatccgttagtgcggcgaatgttttttgttctcgctcaaaggttttacccacttgttttaatgtcaacatactcatcgctccctcttcttttaaaaaatgccaaaaaaaaaatccttcctctcaaataaatgagagaaaggacgctaaatgcgtgttaccaccttaatttacgattacctcacagtaatcgccttacaaagtacccgattgatactcgtttgctatatcgggcaacccccgcattcggctcagttaaaccttaccaaatgaattgctcaaagaccatatttatctagctttcacattatccgcttgcacctgaccggactctcttaaaatgctactgactaaattactcatcttttcatcgcttgtattaagtagtacctatcataattaaagttcaattaaaagtcaagcaagactattcaaaaaaatcagattattgtttaagtaatggcctaatcgacccgaatgtcagcaatccacgcatctttttcgttatctgcatttaataattccggattatcagctaacggtgtgttgacgtttactaattcaccagctagtggactgtcaagatcttgtaccatcttctcagcttcaatggccactaaggtttcattagccgtcaatttttgccccacgattggaacatcaacaaacttgattaacccaaactcattttgtgcggctttggtgatcccaattcttctaatcgatgctgcaatttcctctgtccaaaaataatcattattattcatcgtcatccgtcattcactcctagaaagtatcttcagcttcactgaacatgtaactcttataatggtaccgcatcgacatgataaacccaacgccaattaggttccccaataatgacgagcctccttgtgagatgaacggcaatggaatccctgtcaatggtaataaaccaacgctcatcccaatgttttcgaaaacatggaataagatcatcatgatgaccccagttgagacatacgcgtaaaattcattcttcgtatcaaatgtgacccgaatcatttggtaaatcaacaagaagtacaaaagaatcacaaaacatgaaccgacaaagccgaagttctcaccaatgacagagaaaatcatatcggattcacgtactggcacatggacttgcacttgattgaagcctttcccaaatagctgaccagacccaatcgcttttaaactctgcgataattgtaaactggtactggcagtattatcaaaaggatgcagccaagcatcaattcgattgaattggtacgttttaaagcccagatgcgtcaagattacccggccaggggtcgtcgccgctagtgtaagggccgtgcccccaacagcgactaagacagcaatggctggggctaaaatcttccaggtcacacctgagacaagcacaatcccgcctaagatggcaacgaacactaataaggtcccaaagtcattttgtaatttcaataggaccatcactggaagtgtccatagtaacattcgtccaagtaacatccaatccgtcttaatcgtgtgttctggataagccgtattgtgttgagtaacgaccctgcccaacatcaaaatatatgccggtttcatgacttcagatggttgaaatgagattggtccaagagagaaccaactctttgccccagtttgcaaggcgactgcccgattataaaagattaaaacggcaatcaagaggaaaatccctaacccataagccagtggtgcaatccgccatagttgttctgaatcaaactgcataattgcgacaatcgcaattccaccaatcacgtaccatgcagcttgcataataacggctcgagttgaactcgcacctgatgtatcatgtgacgttgccacatagattgacatcaagccaatcaacgctagcataaagactgaaaagacgattccataatcaactcgcgaggaatcttctgttgtttctacttcctttggcatgctaagtctccttcaatcaattctgctctcattatataaataacccggccagaattctgccgggttactgtaattctaattaattcttaagaattaaccttggtgtaagtggtactcccgtagtaattcgttaactgcatcgtcgtgggtcttagtaatgatactttgaccagtcccttcaacagttgcttcaaaacgtttcttagcgctatcttctacaatcacgccaatttcatttttgccgaccatgacgcttgtcatttcttggccattacgtttgatgtcatcaattgtgacagtaattttttgttctttttttgacatagttatgttgaacccctaacttctttgacttacttttgtgactcgtcttgctgtcgattgcgcaaaacggtgaaatgatctggtactggatcatagccgccccgtacaaacgggtgacaacgcaatatacgaccgatgcccatgattaaacccaaaatagcaccatgtttttggattgcttgaatcatgtaactcgaacatgttgggtaatatcggcaactcggtggtaataatggtgaaattcccttctgatagaaacggaccaatccaatcaatattttccgcaatttatctacctcactttagcgcatgctactgcaagaaattaataatatgactccatgtgctaggcaagaaaacggcaaatggattctggccgccaattgcaaaaccaatcatctgaccaactaataacgcaataattatgagcacgaaaaccaataaaattttctttaaaacgggtttgacgtgttcgtcaaaatttgattgatacacacaatcacaatccttctttaatagaatgcggcttaataagcgcgtttatgttcaatattatctaataagatgccagtccctaaagcaacagcatccaatggattttctgctaagaccaccggaaccttcaaatgttctgagaataagctagcgatattgcgtaataaagcaccgccacccgttaacatgattccccgatcaataatatctgcagataattctggtggtgtcacttctaacacttctttggcagccgcaataatttccatcattgtttcatgcaaggctgattcaacttcatctgcactaattgagacagattgtggcaacccacttaccatgtcccggccacgaatctcaagtgactcactcgcatcggcatgccaaacgttaccaattgttaacttaattgtttcagccgtatgttcgccgattaatagattatgtttcttcttaacgtatgcggcaatttcactattcatcttatcgcctgcaagacgcaatgaacgacttgtgaccacttcacccattgaaagcacagcgacgtcactggtcccaccaccgatatcaataaccatgttaccgcgtggttgaaaaatatccatgccagcacctacagccgcgacttttggttctaattccaagaagactttgccgccacctgatttttcagcagcttcaacaattgctttttgttcaattgatgtaatatttgttgggcagcaaatcaaaatattaggttttgataggaagccctttacatttaatttattaataaaatacgctaacatttcttctgtaatgtcgaaatcagcgatgaccccatcctttaatggacggacagcgtggatattgccaggtgtccggccaaccatccgatacgcttctgagccaactgctaaaacttttttggtttgggtatcaatcgcaacaactgaaggttcgtttaagacaatgccttttcccttaacgttaattaagacgttggcagttcccaagtcaatcccgatatctttagccatttggtgttgctccttccgagaactatattcagtaaatcattataccataagacaggtacctttagtatcctgatttggcaaaataaaaaagcgacgtccgctgaaatagcaggcgccgccagtctgttttatgcacgttttgcttgtttaatccggtgaccggcagcatcaaaatcagctcgactaatatgtgccccaagtgcccgtaatttttgatggaaatgatagtaaccccggtccatgtattgaaggttcgtaaccaacgtttcaccattagctactaacccagcaatgacaagtgctgcggcagctcttaaatcggttgcagccacttcagccccattgaaatgtgtatcgccataaagcacaactgattgaccttcaatttgataatccgcattcattcggcggagttcttccaaatgcatgaaacgattttcaaataccgtttcggtcataacactcgtcttcttagcaagtaattgaagtgtcgtcatttgtgcttgcatatcagttggaaagcctggataaggtagcgtcttgatattacatgcctttaattcagcgggaccaataattcgaacaccagcttcttcgtcaatcacttccgcacccatttccactaattttgataggagtggtttattgtgttcagcaatcgcttctttaatcaagacatttccttgtgttgccgcagcggctaccatgaaggttccggcttcaatccgatcttgcacgatactgtgatccgtcccgtgtaaagcggttacgccttccacccgaattgtctcagttccggcgccaaaaacgttcgcacccatcttgtttaagacattagcaagatccacaatttcaggttcacgagcaacgttttcaatcaccgttgtcccttcagccattgtcgcagccatcacgatgttttgtgtcgcaccaacactaggaaaatctaagtaaatattagttcccactaggcgttctgctttagcttcaatgtaaccataattttgatgaatggttgcaccaagtgcttcaaaacccttcaaatgtaaatcaacaggccgcgaaccgatagcacaaccacctggcatcgcaactcgtgcgtgacctaagcgcgctaataacggccccatcacaacgatggaagcacgcatttttgaaacatattcaaaagctgcttcaaaattcaaatcaccactggcatcgattgttaattggttccgttgttcatcaaactcaactttagcatctaaactctttaatacatcttgcatcatgaagacatcagataaaataggaacgttcgttaattgaacgggtccgtcggttgctagtaaggcagccgccataattggtaatactgcgtttttggcgccttcgatttgaacttcgccaactaatcgttgaccgccttgtataatcaatttttccaagagtttccctccgaataagactgctagtttatgggactaaaaaaatcacatttttagcctgcgcgattatttctaaaaagaattggctaacggtgtagcccatcacaatagcgagaaatactatgacaatctgtacttgacggatatgattcggtttgaaaaattgctcaaaccggattgattgtaagccataaaaactgattaaaataaaaccaatatggctaataattgaaataactgcctgtaacccgattgattgcacttaaataacgccccttttgtgatatgcaaacattgtaacataccgaaataggatttgtctgcccaccagactgaatcttaagaaacaaaaaaagccttaaaccattcaggtttaaggctttttgaatcctacaataagtgattcttaacgttaatccggtttatcgcacgttgcagtgcaatttgagcccggcgtaattcgtcagtatcattatgttcggacgctgttttaattgcgttttgagcacgttccttggcactttgcgcacgcctaatatcaatatcacgcgcccgttcagcactatcggcaacgattgaagcaacgttatggctcacttccatgaacccaccattgaccgcaattgcgtcttcacgtgctggatcatcagtccgtttaacgcgaatctcaccaatttctaaaggggtaataattggctcatgattagccataataccaagttgcccggccatcgctggtacaaccaacaatgttgcgtggtgatcatagacaatcccacttggggtcacgatattaacggttaataccttttgttcttctgccatcattaacgcccctttctaagcttgtttcgtttcttgttcggatggtgtataacccaattctttagcttttgctaatgcagcatcaatattcccgacaagccggaatgcttcttcagggacatcatcatagtcacccgctaagatgcctttgaagcctgccactgtatcttttactggcacgtatgagccggcttggcctgtgaaggcttcggcaacgtggaagttttgtgataagaagaattgaatccgacgagcacgcgcaacgataatcttttcatcatcagataattcatccatccctaagatcgagatgatatcttgtaattcacgataccgttgtaagacgtgttgcacttctgaagcaacttcgtaatgttcttcgccaacaatttctggatccaaagcactagaagttgattctagtgggttaacagcaggataaatcccctgttgtgttaatttacgatccaagttagttgtagcatccaaatgcgcgaaagttgttgcaggcgcaggatcagtataatcatcagcaggcacataaatggcttggattgatgtaactgaaccttttttagtagacgtgattcgttcttgcaattggcccatttctgttgccaatgttggttggtaaccaacggcagaaggcatccgtcctaataaggcagaaacttctgaaccagcttgagtgaatcggaaaatgttatcgatgaacaataacacatcttggccttcaacatcacgaaagtattcagcaattgttaaaccagtcaaggcaactcgcatacgagcgccaggtgattcattcatttgaccgaaaaccatcgctgtcttttccaaaacgcctgattctttcatttcaaagtataagtcattaccttcacgtgttcgttcaccaacaccagtaaagacagaaataccaccatgttcttcagcgatattatggattaattcttggattaaaacggttttaccaacaccggcaccaccaaacaaaccaattttcccacctcgtaaataaggggcaagtaaatcgataaccttaatccctgtttcaagaatttctgaacttgtatttaattcctcaaatttaggtgcagaacggtggatactgtcccgtctaaaatctgcaggaaattcttcgccgccatcgattgtttcaccaagaacgttaaatacccgtcctaaagtttctttaccaactggtacgttaattgcacgaccagtgtcttcaacagccatcccccgacgtaaaccgtcagttgattccattgaaatagtacgcattaccccatcacctaattcaagtgccacttctaagacgacagattcgtcgttccctttgttgacaaccaaggcattattgatatctggtaaagtcgtatctaaagaaaattcgacatcgacaacgggaccaataacttggacaacttttcccatactcatagttgttattttcctcccgcgtttcttattctaatgctgccgcaccaccgacaatttcggtgatttctgtagtaatctgtgcttgacgtgcccggttaaatttaattgataaatcagaaattaaattattagcattatcagtggcactcttcatcgccgtcatggaagcagaatgttcagctgttttagaatcaagtagtgcgccgtaaatcaaactttcagcgtattgcggtagaatggcatctaaggcatcatcaacagaaggttctgtgatgtattcttgatctttatcagtgacttctgaaacatccaagtcggtaataggtagcattttttcagctcgaaaagcagatgtcagtgagttgacatggtggttgtaacaaacgtacaactcgtcaaacacgccgctatcatacattgcaacagctgttttgataatttcacggacttcattaaatgatggcacatcacttacaccacgatattcgtaggataagttcatttgccgtgctttaaagaaatcagcaccagtgccaccaacggctaaaatagcatattcatcggcagacttgtggttttctgaaatcatttcaaccattgcttttaagattgagctgttataagcgccaaccaatccacgatcactcgtgatgaccaaataaccggtctttttgattggtctttccactaacaaattacttaacgtaatgtcatgccgcaatgatttctgtgaagtaccgttagtagcttctgctgctttagcggtacttttttgacgtgcacttgcaattaattgacttgcagccaaatgcgtgacgatttctcgaatcttattcgtatattgttgataagcgattgaatttttttcaatctgagaaagttttgcaccagagaccatttgcatagcactcgtaatttgcccagtttttttagtagaggcgattcttcgtttgatatccattaaagattcagccaattaattcaccccttactgtcctgagtcttgattgtcagcagtagcttcagcgccgacaaaaccttctgtgaaggatttgatagcagcatctaacttatctgtatctggcaatgcagcggtttgacggatagtgtccatcaagtcctttgcgttactttcaagataatcgctcaattgactttcatattgcatgatatcgtcaactggaacgtcatcaataaagccgtgtgttaatgcataaagaatcgttgtttgttgttcgaatggtaatggtttgtgaagtggttgtttcaaaacttcaacagtccgtttaccacgatttaatttcgcttgtgttgccgcatccaagtctgaaccgaattgcgtaaaggcttcaagttcacggtatgatgaaagatcaagacgtaatgtcccagaaaccttcttcatcgccttcgtttgcgctgcgcccccaacacgagaaacagatgacccagcatcaatcgctggacgtgttcctgaatagaataaatcactttccaagaagatctgaccatcagtgatggaaataacgttagttgggatataagctgagatgtccccagcttgtgtttcgatgattggtaaagcagtcattgaaccgccacctaattcatcacttaacttagcagcccgttccaataaacgtgaatgtaagtagaagatatcaccagggtaagcttcacggcctggaggtcttctcaaaagtaatgaaatttcacgataagcagcagcttgtttacttaaatcatcatagacgattaagacgtgcttgccgttatacatgaattcttcacccatcgctgcaccagcatatggtgcaatgtagagtaatggtgctggttgactaggaccagcttcgacaacgatggtataatccatagcgccgtaacgacgtaaggtttccacttgcgctctaacggtcgattctttttgaccgatcgcaacgtaaatacaaatcatgtcttgatctttttgattaataatcgtatcaatcgcaacagatgttttaccagtcttacgatccccgataattaattcacgttgaccacgaccgattggtaccaaagcatcaatggctttcaaacctgtttgtaaaggttctgaaacagattgacgtgccataacgccaggggccttcttttcgattggacgagttttgtccgttttaatttcgcctttgccgtccacgggttgacccaatggattaacaacacgaccaattaaagcatcgccaacaggcacttccataatccggcctgttcgtttaacttggtcaccttcacgaatgttttcatattcacctaagatgataatcccaacatcgttggtttccaagttttgcgcaaccccgtatgaaccgttagaaaattctagcaattcacttgaaagggcgttttctaaaccgtgagcacgtgcaatcccatcaccaacataagtgacagtaccgacttcttcaacggctaaatcttcattataatttgcaagttgttgtttaattaatgcactgatttcctcagttttgatgctcatcaggttcacctctttatcaacgattgactatttcaatagtaatgacttaatttgatctaagccatgtttaacactgccatcgatcaccttgtgattcgattccagtacaatcccaccaataatatctggatcaacgatactttccactaagacctgattgagaccttcgcgtttagcgtagctttggctaatctttgcgatttgatcaccatctaaagcaacggctgacgttaccttagcgtgtgcaatccccatcttttgatcataaagatcttcgtaggccgcaataatgtatggcatctcagccattctttgatagtcaaaaacaaggcttaaaaagtgttgcatgagtgtactaaattcaccggaaaggctctttagaagctcacgttgtttcaatccagataaagtcgtatcagtcagaactgcacccaatcttgggttgtcattgaaaatagtctcgagtgcttgtatctcttcatggatactttcaaattgttgctcttgttctgcaagggaaaataatgcctttgcatagcgttgtccgactgcatatttatctagtttcattttgcttgtccaacccttcaatataggaattgatcaatgacttttgatcagtaactgacaattctttcttaatgagtttagaagcaatttcaatagatagttgagcaacatcatctctcgcactgtttaacgcatctaaacgagattgttcgatgtcttttttagcattttgttttaaagtttggacttcttcttgagcaagtgtgaccatgccttcgcgttgtttttcaccatttcgcttagctgtattcacaatttcaactgcttctgacttagaattcttcaactctgttgcgcgttgtgctgctaatttggcagcatcttcacgtgattgagcggcgttatctaagtcgtttgtaattttgtcagaacgagcttgcatcatttttgaaacaggtccgaacgcaaatttaccaactaaagcgactaaaatgataaagacaactaatacgaaaagtgaatctccaaggtaggcttcagaagcaccaacgattaaattactaaacatctattgacactccttccttgacttactgactaatttttaaagcgaaaatttagattcactcggattaactaaataagatcaagaaagaaacgacgatagaaagaattggaacagcttcaatcaacccaacaccgataaacattgttgagcgtaattctgctgataattctggttggcgtgccatactttcgattgtttttgagataaccttaccgttaccatatgatgctgcgaatgctgctaaaccagctgcgatagctgctgctaaatagttcatgttttttcctcctaatttttagtcttccatttcaactttttctgaaatatagactatcgataatgttacaaatacatatgcttggattgccccgataaagacggagaatccttgccaaaccatttggatcggtgccgtcacaagcatcgttgctggtccatgtgagaaggccattttaactaataaacttagtaaaacttcacccgcaaaaatgttcccgtacaaacgcaaggacaacgttaagaaattggtaaattgttcgatgatattaattggtaagaaaaatcctaccggtttaatataactcttcatgtaattaccaaaccctaaccgttcaacactaaagtagtgcgcaatcactaagacgatcatcgcaagcgacatagtgataatcggattggccgttggactcttcaaccaagttacatcatgtaccttaatttgaagaatcaaaccaagttgattactgataaatacgaacatgaacatgacgaatgcaaataagtaaaattgtttaccttcttcaccgggcatcgcacttttaacgattccgttcgtaaaatcaatgatccactccaaaatattctgccgtttagtcggtttaagcgcaatttttcttgataaaaagaaaacgagtgcaaaaaccaaaactgcacttactaagaccgatagacagtttgctaaattaaaacgaattcccaaaatgctaataatgggatatttatcatccacaaaattccctcctcccttaggcttatttgttgattccactctatcaacgactacgtctacgcgagttgcacaacgaacctaaaaacagcaatatttatgtagaaaaattaagcataaatcatcaccgcaatacaagtatgataataccaccattaaattaaaagtacaaagcaaatactaactaatttctaattatttttttgtcaatgcactcaaataccataaatattatcatatcaaaagattaaacttattaacggttgcttttttggcaaaaaaaacgcgtaacacaggaaaatcaagtgttgcgcgcttttattatcggtacctaattaatggctatttagtcccgaaaagacggtcgcctgcatcccctaaaccaggaacaatgtatccatcctcgtttaaatgatcatcaagaccagctgcatagatgtcaacatctggatgggcttcttgaacagctttaacgccttcaggtgcagccactagtacaacaaggcgcattgacgttgcgccgcgttttttaagggcatcgatggccatgattgctgagccaccagttgcaagcattggatcaacgatgaatagttgtcgttgatcgatatctgttggtaatttaacaaagtattcgtggggttgtaatgttttttcgtcacggtacataccaatgtgaccaactttagcggctgggattaattctaaaacgccatcaaccatcccaagacctgcacgcagaattggcacaacggctaattttttcccgctcaattgtttttcaattgcaggccccattggtgtttcaacttctacgtcttccattgctaaatcgcgcgtgatttcataaaccattaattctgcgatttcgtttgcgacttcgcggaaaactttagtacccgtatccttattccggataatcgttaatttgtgttgaattaacggatgatttaatactgtgaattttgccatttactttgcccctattctattcaatgaatttagtccaaatttttttcgcaaaaaaagagtgactccaaagaaaaccttctccgagtcactctcccttccgcgtaaaattctgtttactattgtagcgtaaatagcatcaaaaaactagcggtattcattaattaatctaaaaatttagcttgtgtgattggaaaacgatccgtcaacgctaaaacatctgcactaatgcgcgtcatggcgtctaattgatcgtgtttttcaatcacttctaaaattaattgcgcaatcaattcacaatccgcttctttaaacccgcgcgatgtgattgctggggtcccaattcgaatcccacttgccttaaatggacttaatttttcaaaaggaatggtattcttattaacggtaatgtggacactatctaaaaatgcttggacttccttcccatttaagccactctgcgttaaatcgagtaacattaaatgattgtcagtcccgcctgaaaccacacgtactaagtcagattgttcgaaaacggcagccatcgcttgcgcattggccacaatttgttttgtatatgctataaattcaggttgtaaatcttcaccaaatgcaacagctttcgccgcaatgacatgttcgagcggtccaccttgaataccagggaagatggcagagtcaattgctttggcatattctgctttacacaaaatcattccaccacgaggtccacgcaacgttttatgcgttgttgtggtcaccacatcggcatatggcactggacttggatgaacaccagttgccactaaaccagcaatgtgtgccatatcgaccattaaataggcaccgacatgatcggcaatggcgcgtaaccttgggaagtcaattgtccgactgtatgctgatgcccctgcaacaatcattttaggatgaatttcatccgctttagcagcgagcgcatcataatcgattcgttcgttatcgtcagcaacgccataactatagaagtgataaagttgcccactgaagttaaacggtgacccatgggttaaatgaccgccatctgtgaggttcatccctaaaatcttatcaccgggttctaaaagcgcttggtaaactgccatattagcctgcgaaccggagtgcggttgtacattggcatgttctgcattaaaaagttgtttagcacgttcaatcgcgagtgattcaatttgatcgataaattcacaaccaccgtaaaaccgtttgcccggataaccctcggcatatttattggttaatacgctaccttgtgcttcttgaacagctccggaaacaatgttttcagaagcaattagttcaatattatgcacctggcgttgttcctcttttttaatcaattcgtaaatttctggatcagtttgttcaatcatttacaatcactcctcttcctattaaaatagtgcctatttcgaagtaaagtattgttggccggcagacttctcgaggcgattcatatacgctaatccgacaccctcttttgcgaagccttgcactaatataattttaacctcaggattcaaatcaaaataccgtaatccttcaaacaagtgttgactagcagtcactacagaatcacctaaagagaactgatctttaaacctaacgtcagataactgccctaacaccgtatcaaccgccataacaccaaatggcacactttgttgactggcccatttaaccgccgccggaaattcatctggcgttggcactatgtaaacctgtgcatttggagcatagtgtttgtatttcatgcctggtgcctttggcgtttcagctgcgccaactttatggtggtttgtcataatcggcccaatcacacgttcaatggcttcttgagtcacaacaccgggtcgtaaaataacgggtgtcgcaacacttaaatcaatcaccgttgattccaacccaacaccagttggaccatcatcaatgacaccggcaatctttccatttagatcatgtaaaacgtgatcggcagtggttggactgggcttgcctgatgtattggctgaaggccccacaagtgggacaccggccgctttaatcaagtctaacgtcaccgcattgttcggcattctaaaggcagcggtctttaaaccacccgtcacaactgaatctagtgccgcatgttttagcggcaaaataattgtcaatgaaccgggccaaaaagcgtcgactaattgcttaaatcgatcactaacttcggctgcgtaatgctcaaccgtcgcaacacttgctacatgcacgattagcggattatcacttgggcgccccttagcggcataaactttcttaaccgcttcaggattcgtcgcatctgccccaagaccatagacggtctcagttggaaatgaaatcaattcgcccgcttttaaatctgctgctgcttgttcaatctgttctactgtgtatctcttggtttccattataggccttccttactctacttctgatttacatcataccaaattccgattgaaatcgtaacccacacgggccattctagaccaattagccatatcttttttgattgtaaccgctacatcggtcgattcatgttcgaataaccgaacgatcgcctctttttgctgataaccgaactctaaataaagctgcccatctggttttaaatacgcacgcacttctttagcaaaccgttcataaaacgctaagccgttattatctgcaaatagggccaagtcgggttcgtatttcaaaacggacgcatccatcacatgccgttcatcttgtgcaatatatggcggattagacacaatcacatcaaactgttggcccatcactggggttagaaaatcacccacgataaagttaacatgcgcgtttaattggcgcgcatttgcttgtgcaacagcaatcgcttctagtgaaatatcaattgcggtcacttcccattctggatgctcacaggcaagggtaattgcaatggcgcccgttcctgtcccaacatccaacactttaagtggtcggttctttggttgtgtagcatctaatatccattctaccaattcttccgtctcaagtcgtggaataagcgttgccggcgtcaccttaaaatcgcgtccgtaaaaattagcatatcccaaaatgtattgtgccggttgatcagcgataaacgcgtttaagtctgcttgatactgatcgtattcggcagtcggcatttcatcgtgataatgcaagaccagttgggtcgtcgtccaatgtttacgaccgagtagtaaaaagcgcgctgcttcacgttctttagcgtgttcttctaaaaataaaaaagcccaattcagggctttaagataagtgagctgtgccatcttgtaattgctccaatttttcggtttgatcgtaaagaattaacgcatcaatgacgtcgcctaattccccgttcataatccgatctaatttgtttaacgttaaaccaattcgatgatccgtcactcggttttgtggatagttatatgttctaatccgttcagaacgatccccagacccaaccgctgacttccggcttgaatcgtattcactttgattttgtgattcatagaaatcataaacccgtgactgtaagatttgcattgccttcactcggttttgttgttgtgaccgttgatcttgcatcgcaaccacaatcccggttggaatatgcgtcatccgcacggctgaagaggttttattgatatgttgaccaccagcacctgaggcacgataaacgtcagtccgaatatccttaggatcgagctgcacgtcaaccccatcatattcaggcataactgcaacagtcgctgttgaggtatgaacacgaccttgtgattcggtctttgggatccgttggacacggtgcgcaccattttcatattttaacttcgaataaacatttttaccggtaatcatcatcgcaacttctttgaagccacccacttctgtagccgtttcatcgatgatttcagtttgccagttttgtgattcagcgtagcgttgatacatattcaacaaatcacctgcaaagagactggcttcgtcgccaccagcagccccacgaatttccatgatgatattcttttcatcgttaggatccgttggtaacatcaaaatcttgatgtcttgttctaattgttccttttcatcttgtaactcacttaaatccgctttagctaattcttccatttctgggtcattagattcgcgtaacaattcttcgctttctgcaatgtcgtttaagacagtcttcaaacgcgtgtatttaccaacaatttcccgtaaacccgcttcttctttagacaattccatataccgactggtttcgttgatcacttctggatcagacattaattcctgtaattccgcatagcggtctaacaaactatcaagttgttcaaacattttatccatgaatgactagccttccttttcactctcttgtgttaccggtgggttaaaatagtgtttccgacaaacggggtagtatgcttcgttgcccccgatttgaatctgttcacccgtataaaccggtttgccatcgttcattcgcaagttcataatcgcttttttgcgacagaaccaacagatggtcttcatttcttcaatcttattggcaaatagcaataagtatttcgagccttcgaataattcattcttaaaatcattcttcaacccaaacgccatcactgggatattcaaatcatcaacgacctgcgccgcttcgattacgtgatgccgttctaaaaattgtgattcatcaatcaagacacacgctgcatccggattagtcgattgtaccaactcaaagatattcgtatccgagaaaatcggtgtcgcctcacgtttgagcccaatccgacttgaaacaatccccaccccgtcgcgattatcaatcccactcgtcaggatgatcactgatttattctgctcttcataattgtgtgcgacttttaaaatttcaatcgacttaccactattcattgcaccatatctaaaaaataattgcgccactctcaaacacccctatgttaagcacattttaatctagtatacctgaaaatcagcgaggcaacaatattcgccactattaaattctaaagtttcccttattttatttgcagatgcgtttttatatcgtccaaattgagaatttatgctatgattatgaacattgaaagggtggcaagcatgacaattaaaagctcatttgcaattacagcaggacgtttttcatattggtatttacatacctttatgaaaggtggcagctccctccccgggaaaatcgcaaccaagttcgatcctgctgtgttaaagcagttaaccaagaactacgacgtgattatcattaccggtaccaatggtaaaacattaacgaccgcactcactgtgcagacgttgaagcaaaaatacgatcatatcatgaccaattcgagtggctcgaacatgatgcaagggttgaccaccgcctttttagcagatcatcctcaaaaaagacaacggcaattggccgtcctcgaagtcgatgaagccaatgtggaacccctttgtcactacatcaagcccaaagcgattgtgatgacgaatattttccgtgatcagatggatcgtttcggcgaaatctacacgacttataatatgattctagcgggcgtcaaactcgttcctgaggcaaccctcattatgaacgctgacttacctctcttttcatcggttgaacttcctaatccaaagatttattacggattcaaccacttaccagatggcgaaatgatggctccaagcaacacagacggcgttttgtgccccgtttgtgatcacatcattcattacaaattcatcagttatgccagccaagggaagttttactgccctaattgtggctaccaacgacctgaattagacgaagcagtcactgccatcaatcagatgcaccccacaaattcacactttgaaattaacaacgaaccgtttgaaatttcaattggcggcatgtacaacatctataacgcacttgcagcctatagtgtcggtcgattctttgatattccagtgaaagcaattcaaaaggccttcactgaagacaaacgaatctttggccgtcaagaagtcattcaattaaaagacaaagcggtcacattggtactcgttaaaaatccggttggcttaaaccaagtcttacaaatgatcagttctgatccagaagacttttcactcgcaatgttgcttaatgctaactatgccgatggaattgatacgagttggatttgggatggcgagtttgaagacttactcaaacacaacattccaaccgtgattaccggtggcgaacgcggtgacgatatcgctttccggctaaaagtagctggtgtcacggcagatcaattacacgaaactaaagaactcgatgcaacgatggcagccattgaagcagccccaaccaaacatgtttatgtattagcaacttataccgctgttttacaactacgtaagaagctggcagctgccaattatattaagaaaggactatcagtatgacccagacattaagaatttgtcatctatacggcaatttaatgaacacatatggtgatcttggtaatattttagtccttgattactatgccaaaaaagttggcattcaaactgaaacagaagtcattagtatcggtcaagatttcgatgcaagtcgttacgatatcgttctcttcggcggtggccaagacttcgaacaaaaaatcatctcagaagacctcaacgacaaaaaagcagccctcaccgaatacattgaaaacggtggtgttatgcttgccatctgtggtggttatcaattattaggtcactactatattggcgcaaacggcgacaagattcctggaatcggcgcacttgatcattacacattgagccaagataacaatcgttttatcggtgatattgtcatcgaaaaccgtgagtttaacgaaacctacctcggttttgaaaatcacaacggccggactttcttgggcaaggatgaaaaaccacttggttacatcaaacgtggtcacggcaacaatggtgatgacggcaccgaaggttgtgtttataaaaacacatttggttcatacttccatggtccaattctcacgcacaacggtgttttagccaaacgacttttatcgattgctgttagccggcgttttccagaatttgatttacaacaaatcgctgacttaccactcgaagaatcacgttaccaagtcgatgcagccggcgtcaaacgcgtccaaaattaacaaatcaaaaagtcgaccattatgcggtcgacttttttgatgtcttaatcatttcgcaagaaaaaatacactttttattcataaaatgataatcgtttcacaatacttgctcggtatactgactttaacctataaaaaggagcgaatcattatgttaaatcaaatgccagcagtcgagtccgttcaaattaatcggattgaaaatcatgataaagttttcgcaaccactgaaagtggtcaagaaatcgaattacatattaccgaccaacaaaaaaaggaccgcctcttctgggaatccctcatcaatatcctccgcgctgaattgtggttacccctgcaaaagagaacccacgaactactccaaaacgactggctaacggtcgatggctaacgtgtggctctgggttcggatgacttacagaacacgtttaaacgatcagaacacaactatccaaaagggcgctaacaaaaatattgttaccgcccttttgcatatcaatgtttcgttttttagcgttgccctgtccactccgctaaatactgatccacaaactggtgcatgaaatccgttcgcgcttgcgcgatttcgcgcgctgcctgtgtgttcatcgttgctgccaatttaaataatttctcataaaaatggttaatcacggtagacggttcgcgatagttttcctttgtcaattccgcccgtggttgaatctcaggatcataagcaaccccatcctgtgcgccaccatacatgaaggtccgcccaatcccaatcgcgccgattgcatctaaccgatccgcatcttgaacgatttgcccttctaaacttagcgtttggtgttgattgagatttttcgaaaaggacatgtggtcgataatatcaaaaattgccgtttgttggccatcttgtatgccgttttcggttagtttagtttttaccttttgtcgagcctgttcaacatcagtcgcgattttttcatcaatcacatcatgcaataaggccgccaagataatcgttgttaggtccgcagctaactctttttgctgaattaaacgggcattattcacgacccgttgaatgtgatcgaatccatgaccgctgtgttctgctgccaattccgttcgtacaaattgttcaattgcttcgatttgtctttgcatacttgtcatcctactcttttaatcattaaaaaaattgcaaccacggctgcggttgcaattggttatattcagtttacttattacccggttctgacgcaataatttgcatgtcaccttttaagtcccatgacttaatatcaaatggtaacacaaaatgcatattcttgtgaattgggtaagtttgcccatcggcaatcagttcgccttcaccatcgaccacggagactaaagtatagggtgccgttgtccgatcaaagtgtaagtcgcccttcactaaccattggtaaacactgaaaaatggtgacattggtggttgcacataagtcgtgattgttgaatctccaacatgttctgtttgaatattcaaaacgggatcttgatgcggcacaatcgtcgtatcaattgattgcttcaagtgtagttcgcgtttttcgcccgtcttagcatcaacccgatcataatcgtataaccgatatgttgtatcactactttgttgggtttcaagcgccataatccctttgttcaatgcgtgaatcgtgccacttgggacgtagaaaaagtcaccagtcttaacgggcactttgcggagtaaatcatcccacttgcctgcttcaatcattgctgttaattccgctttggtcttggcatggtggccatagattaaataagcacctggttcagcatccaaaatataccaacattccgtcttaccgagttcggttggaccttcatgagcagcagcataagcgtcatctgggtgcacttggacagaaagacttgcttcagcatccaaaatcttagttaacaatgggaatactttaccttctgcattaccgaaatattcgcggtgggttgcccatgcttgatctaatgtgagcccttttaatgggccattttcgatggtactaggaccatggggatgggctgaaatggcccaacattcaccaatatcgccgtctggtaaatcataatcgaaggcttcagctaatttgcgaccaccccaaattttttcttgaaaaacaggttttagaaataaaggttctgtcaattcactcactcctaatgcgctttatttatcaatagtcccattttaccacaaatgtaagcggataatacgcaaatttgcgaatttgactaggcttttgtttctaggtgattatccgctaaaaattgtgccacaatcgcatcccgttgttccaaaaagaccggattatcagccgttggatgaatgcgattactcaggacaatcagccccgtttgccgcttgcgatccaatagcatgaacgtgccggtaaaaccggtgtgataaatcagtggctggtgttcttgcggctcaaagcgcaaatcccagcccagtgagcgcccgagatgttttggtgtccaatcacgatagagactcttaacactcgcctgactgattggtggctggtcaaccttcaactgccctaattggaactgggcaaagcggacaacgtcttttaatggagcaaacaagccggctgcaccactatgattttgtaaaatcgcacttttcggatcgtggacagtgccctggattaagccgcgttcggcactcaattcagtcgggaccgccaaacttttgtccggattaaacgtactggcttgcataccgagtggggttaaaacgagttcttgaatcaaatcctgaatcggtttttgatagatggcttcaatcatccagcccaaatacaacatatcaatgtccgtgtaaacaaccttttcaccaaaatttgggccgaccgttaattgcgtcaaaagcgccgtttttaattcggcagccgataattgattccgattcggaatgtagcccgttaaaccggacgtgtgcgtcaatagatgcaagaccgtcacccgtcgatctttaaaggccggcaacaaactatgcacttttgttcgtaaagaaagccgccctttttccaatagccgcaaaacaatcgtcgtcgtgccaatcactttcgttaatgacgctaaatcatacaactgatcagcttttaacggcactttttggggcactaattcggcctgcccgattacattagtcatcacttcagggccttcgatgatggcataagaaacaccagggacaatcccttcatcaactagcgctccaatttgccggatggtttgttcaaatcgcatgttaaattcctcctactacatcaatatcactagtatacgccaaacacggacaaaaataaggccgcagattttatctgcggccttatttgcgtcattcatgattaaattttaacgttgcctgagaattgactattgtacaagtcagcgtagaaaccatcttgtgccatcaaactatcatgggtcccggtttcaataatcgaaccgtgattcatcacgatgatgttatcggcatcgcgaatcgtcgataaacgatgggcaaccacgaaactggtccgattttgcaacaagcgttccatggcgtgttgaatatgaatttcagtccgtgtatccactgaactggttgcttcatccaagatcaaaatctctggatcggcaacaaaggcccgcgcaatcgtcaataattggcgttgaccttgggagatattcgaagcttcttcattcaagaccgtctcatagccatcaggtaattgacggacaaaaccgtcaacgtgcgctgctttggcggctgctaaaatggcttcatctgaagcatcagcgttcccatatttcaaattatcccaaatcgttccagtaaataaccaagtatcttgtaaaaccatcgcgaagtgacgccgtaattgttcccgagtcatatcgcgcgtatcgacacctttaagcttgattgaaccgccactcacgtcgtagaagcgttccaacaagttaatgatggttgttttaccagcacctgttgggccgacaatcgcaatcatttgacctggtttgacttgcaagttgtaatccttcatcaagatatctttaccttgataaccgaattcgacatgttctaattcaagtagattttggtcatcaacaatcgctggcacttctgatgggtcgtcactcatgtcatcttcatctaagacttcaaagacccgttcagctgaggcaatcgttgattggattgtattcgctaagttggccaattgcgtgattggttgtgagaattgttgcgtatattgcatgaacgcttgcatatcccctaaagtaacttggccgtgagaaacacgaatccccccaacaattgctacgaagacgtaaccaatgttattgacgaacgtcattaacggcatgatgactccagaaataaattgtgccttccaagctgctttatagagtaatgcattttgttcttcaaaggcatcaattgtgacttgttcgcggttgaaggtctttaagaccacttgaccagagaaattttcttcaatttggttgttcaacaaccccaaacttttttgttgcgctgcgaagaatttctgtgatttcggtgcgacaatcccgacgacgactaaactgagtggaatcgtgactaaggcaattaaagtcaattgccaactaatcgagagcatcatccacataacgccaataaatgtcacagcactcgttaccatttgcgttaaactttgttgcaaggtacttgcaatgttgtccatatcattaatcgcacgactcatgatatcgccgtttgagtgtgtgtcgtagtaattaatcggtacccgttgcatcttgtcttttaattctttccgtaattcatagacggtttgttgggaaatccgcgtcatgatgaattgttgtaagaaactgaaaaccgctgatgctaagtacatcaaaatcaccgtcataataatgtgttgaatcttatcgaaatcaattggtaagccattcatcggcatgcccgctttttgcatggcattgcccttcataacacccttgaagatttcggtcgttgcttgtcctaatacttttggtgttctaatttggaaaataacggagatgattgctaaggctaacacaatcactaatccgattaaccggctagacatgtaggttaataatcgtttggttgtgccccaaaaattcttcggtttttcaacgacaccacccatgccacggcctgggccatgtccaccttggggtcgattggttgttgttttttcagccattagtcttcatccccctctctgatttgtgagttaataatttcttgatatgtggcgttattagccttcaattcagcatgtgagcctttaccgaccagctggccttcatccaagaccaagatggtgtcggcatcggcaacggttgatacccgttgaccaacaatcacaacgacactcttttgaatttcagcatcttcttttaaggctttccgtaataaggcatccgtcttaaagtccaacgctgagaaagaatcatcaaagacataaacagccgcttttttaaccaacgcccgtgcgatggcaagccgttgacgttgaccaccagagaagttgcccccaccttgttcaacgtgactatctaagccaccttcaagttcgctgacgaaatctttagattgtgcaatttcaagtgcgtgccagatttcatcatcggtcgcattcggattcccatattgcatattttcccgaatcgtcccggtaaataagttcgctttttgagggacaaatgcaacttgttggtgaatgtcatggagggtcacatctttcacgtttaaccctttgactgtcacttcacccgtttcaacatcgtaaaaacgaggaatcaagttgactaacgtggtcttccctgagccagtgcctccaatcacggcgactgtttggcccgctgtcatttggaaatcaacgttttcaagcgctaagtgttccgcattttgataacggaagttgacctggttgaaagccaagcttgctggttgatcaccaaacgttttaggcgtcgctggatcttcaatcggcgtgtgtaaatcaagcacttcattaatccgcactgctgaagcttgcgcccgcgggataaagacgaagaccattgaaagcatcatgaaactcatgaggatttgcatcgcataagtcacgaacgctaataaattcccgacttgcattgcttgattggcgattaagtgtccacccatccaagtaatcgcaatgttagtcccactcatgattaacgtcatggctgggaacatcactgacataatactataaactttcttcgcattttgcgtgtagtcagtattagcttcatcaaaacgttcttgttcgaacttgtcgcgccggaatgctcgaatgacccgaaccccggttaaaccttcccggaaaactaagttaatccggtctgtctttttctgcattgccttgaataatggcacagcgaagtacatcaccccaccaatgaagagtgccatgattggtaagacaaccaagaaaatggatgtaagttgcgcatctttttgatacgctaagaaacttgcgccaatcaacatgataggtgccataatcatcatccgtaagaacatcattgccacattttgaatctgcaccacatcattagtcgtccgcgtaattagtgaagacgtcccaacttgatccatttcatcgtgtgagaagttgatgaccttccggtagatatctgaacgtaatttttggcctaagccttgtgacgtccgtgccgcaagataaacgttgcagacggccgcgataatactaattaatgaaaaacctaacattttaaagcctgcttgccagatataatcaatattccccttagcaatcccgtcattgacaatgtcggaggttaaattgggtaaataaaggttactgacaacctgaatcgtcatgaataaaaccgcaccaaagacggcccaacctgacattcttttctttgcaagtttaagcatgttgtgtgtcccttctttccttatccttgtttgctggcccctgtttctaaccagcctaatactaattcgaagcgttcttggacctgttcaattgtaatcgcatggtcactttcttgttgcagataatacgctgcaatactttgaaagaccgtcgtcatcaactcatgaaataaaattctaagcgcttcgggttgatctgcgttaatcttgagcaagtcgtaattgacgttttcttctaaaaagcgcatcccatctacttgtttggcatgcattaattctggtgacatcttgcgctggttcttataatccatatgtaagaagaggtgcttgtaaaattgtgcattttcaccattaataatctcttctgccatttcagcaaagaattggcgaattgccttgaatagatcaccatgaacagccaacagactcttttctaaatcctgctttgaactgtcgcgtaataagctaaggtcgtagaaaaaaatatccgccttatcttcaaagtactgataaaaactgcctcgcggaatctccgccgttttaataatgttgctgacagatgcttcattaaacggtacccgtgaaaactcagcatgcgcagcttgaatcagtcgttgttgcttttcctcaggtaatctaaaaaatgttttcttcggcatttcgatactcctttctgaaaattaatgacagagcgtcataattgtgacgtaatgtcataatacgccaacttaggcactcatgcaagcattaaatccacaaaaaaagaaccggcaggctatcgtctgccggttccctttaaaaggtgctatttatcgtctttgtccattttttctttaatatcatccatcacgtcattggctttttcagcaactttgtctttggcatccgctaatttttctttagcttcacccataaagccctttgctttacctttggcctcagtttcgcgatcaccagtcaccttaccggctgtttcttgtactttaccggttacttggtctttcatgccatctaacttttctttatctgtcattcaaaatcactccttcttattggtctacctatatgataggatagctaaccaacattagtcaaaatttatgattatgagtcgcattatgtcagtttaccatcgcgcatcacgtattgatgatctgtataatccaagacgcgttcatcatgggaaaccatcacaatcgtctgtcctgtctctttcgtgattttagccagctgctcagcaacctgtaaggcccgtttactatctaaactagcggttggttcatccgcaaaaatcaaatttggctgaccatacaatgcccgagcaatcgcaactcgttgacgctgaccaccagataagctcgttgggtactgacgtcgttgatcccaaacacctaaattggttaatagttgttcagctgattgtggcgcttgcttttcacgtaatcgatcgactagttcgaattgttcttcaaccgttaaaaatggaaccagattcgaactttgtaatataaagccgaaatcgttaaaccgtaatgcagaccgctgtttttcgcttaattgactaatctcttgatctttaaaaaagagcttcccactcgttgggccttgtaaactacccataatcgttaataaggtcgtcttcccagaaccagatggtccggttaaaccaatgaactggcccttttcaatcgttaaatcgatttgatctaaagccgtggtttgctggtcgcctgcgccaaattttttgacgattttttctaaacgcattaaagccatcctatgcccctccaatcgcatcaagcggatcaatcttcagaatccgccaaattgagaataaagcgccaatgactgtcatcacaagtaaaacagcagaaaaggccccaattagtaaaggattatttgtatacggcaccgccgctggtaataccaatgttgtcaatgcgttacacaacaaaccaaggccaatcccaatcacccctaagaatacagattgccacattaaactaccaactaattggccacctgaaatcccttgtgctcgcataaccccgtatacggccgttttttcaatagtaataatatacatgaaaatcccaacgataaaggcgacgatgactagcaatgcgccaatcatcaaaccaaacgtcttaacctgtggcccataccccggaatcttatcgattaattctggaattgtcagtttggtcagctgatccgttgtcttaatccgcgcgtttccctttaatactaaagcattaatgcgcgtaatctgatcagtgccgtagcgcattcggctaaaatcggtcaaccgcaaataagtcaccggttgcgtattatagcggtggttcgtcgtaatcccaacaattttgtacttttgttgacgcccattcaatttaatttgttgatttaaagcaattccttgtaagccgtcgtcgaccacaatctcatttgcctttttaggataccgtcctttttgcaacttaggcttcaaaaaagcatcaaaatcgataccaaaaacactcgtattttgcttacttaaacctgaactactcacaacacccatcatctgagcaagttgcgcatgatttttctgtgcacctttaatagagggtaattgatcaacatctaattcagaagcagccaagtttttattcgcatactgactaataacaacttctttggcgtgccattgatcaattgccgaacggttattattggctagcccatatgccaaccccgttaaaaaatagattaaatatgcaattagaaaaatcgtaaaaatgatcaatgaataacgtaatttagcatgtttaatttctttaattgctaaatacatccaaacacccctttcttaactgttttaatctaacataaagcatcacgccttgaacagcaatccgcattcaatcttttattcattcacgggaatatgctatgataagcacacggaggtggcgcttatcaaacacgtcaaacatgggattgcctttttgcttctgattatcatccaacaagttcctttaatgattgtcagtggcttaacattgctccctaaggctcaacagacaacccatctaattttagtctttggttggctttttctaatcacgactatcggcattactgccctgatgtggtattactaccaaaaaattaaatcaacgcgttatgaccaacccttcaccaaacagacttggtggacaatgttgattggctttatcgcgatggttgctgtcaataacggtacgatcccgtttatgcatgctaccggtaatgccaatgttgatgcactaacctcagtctttcagacgattggtattttcatgctaccatacgccctattcttaggtccgattatggaggaattacttttcagagggttcctaatgaattggtttttcccaggcacaccaatcatctcaatcgggttaagtgctatcttattcggattgatgcacggcgcaactgatccgatttatttcatttcaaaagcactgcttggcctaattctggctatcgtctactatcgcacccataatattaagagtaatattgccttacacatgttgaataacattactgctggctttacgattttttaaacgactagaaaggaagcatgactatgtctgcattaacaaccatcttaacttacatccaagaacatcctgatgaagtggttctagaaccgtttcaatatgcgaacgtgattcgctttggcattagtgaccaagtcgatctgccagatgccgagaaactgttccctgatatgcggctacacgttaaccggattgaccccgagtacgtcaaagaacaccatgacttattgacgactttttatcaacaaaccgaagaaaaacaaaaagacggcttccaagatgtgtggattactaccgcccatcttagtgaccgtcaactttatttagtggatctttcttttgaataagcctcattttgaacagctaaaggtcagctgtattaagtatgctattttaaccttgtttctctttgtcatgcgtgcctttattgcgcatcccatcattctgattgccagttggattagcactgctgtttgcggcgcatatttcattgccatgttaattgtttattattacggctaacgttgcatatgtttggtctcagcaatcacttcttctgtaaaatacaattgaaaaccaaagaacaccgtcaacataatcgcagctatccatgcagtgcgcacattgattaacttaacaattaaccctgagctaatagtaccaatgaagaagctaccaacaattaacccgaagtaccgggctttttgttggtagtttttttctttggtcgctaaatatagataagtattttcgattaatttcttataattgccggtcgtaaaagcattcgcatatggatagccattaaccgttgaataactcgctaattgcatggccatcgacatcgacagaatcggtgtcacaaacatgttgggaatcgcggttgataaaaaaccaactactactaaagcaataatttgaaaccctaataaccacaaccgccaaacattcaacccaccagtgttaaaatgccgcttcgccagctgcacaataataaccccaaacccaaatgaaataatgggtaatatcttttcaggaagttgtgcccactggttcgttgcgatatctaagccgatgaacacgatattaccggtctgtgcactcgcaaagacgccaccacgtaaaatcacacaatacgcatctaagaagccaccaagaaacgttaaaaacatcgccgtgcttagccgatcatgaaaccctatttctttttgcaacccaatccctccaaatcaatactcttattatacgcaaattaaaattgaaatcaaaaaacggattgcactatttcacagtcgaaataaggtacaatccgctttacactataaattaattgaattgacatcttgaccatggaccacttttctaaagtcgaccagtcctaagtccaaaccgcgcagcaatacttcagccgtcccgacgttggttgccaacggtacttcataaacgtcagataatcgaattaatgcattcacatccggttcgtgaggttgagcagtcaatggatctctcaaaaagattaccaggtccatcttattttctgaaatcaacgcgccaatttgctgatcgccccctagaggacctgacttaaaccgtgtaatcggcaagccagttgcttcaataattttttgaccagtcgttccagtcgcaaataattcgtgttgcgccaaaataggtttataagccgtcgccagtttcacaatcgttggtttctgacgatcatgtgcaattaatgcaattttcatctgaatccctcctaatgtctgcggtgtttaaccaccgtaaaaaagtgtaacacacttgccaatagaatgaagaagattaaaacgaatgacacataattaagccaaaactggccaattggcaacactaagttcactaattgttgcagtaccatcgtaatcaaggttgcacaggcgaccatgccaaatagttgtatataccgtttcactgtatcatccgtcctctttgctttagattgaatgcttgcgccgacttggcgacattccgcttgtttctgcgctgaaagtgtctttaaaccatacgtttttgtctggacaacttcccggatttttaaaagtccagctgcccccaagactttatcaaaagttctaaaagtcccatcagtcacaccagtaaccaattcctcagctggactggcataacaactactaatcgtaatgtaacttttgcctttgaagcgatctggtaacgcatctcccgcccgattaaatcggactaaccgttgccgcacgcaatccaagaagtttttcatcacacccgacattgcaccccaataagttggcgcagccagtatccaaacatcggctgccaataacttagcttccagttcatccaataccggattggctttgccagcatctggtaatatttgataatcatttaaaaagatcacttcaacgtcatcttccggttttacacctgctaaaacggcatctaaaagttgcccattgaccccatctcgttgatgactgcctaacactcctaaaatcttcatctgatcaagcctcactctttatactactttcagtttacacttccaatcactaacttaccataaaaaaacgcccagaccaatggcctagacattgtcattattttagtttagtaccaaccattacttaaccagaagctcttagcggcatcccatgaaccataacgacttgttacatattgatctgcaacgcggtcttggttagctgctgaataatcaccatttaagtatgaagctgataattgataacggccgattaattgaccgttacgtgctgaatatgaaccgcctgattctttttgtgcaatccattccttagatgaactcgttgtagttgttatttgtgcagctacaggtgtttgttgtactggtgcagcttgaactgcaggttgtgcttgaactacaggggctggtgtttgaacaggtgcagctacttgttgagttacaacaggggctggtgtttgtgccacttgatcagcatcaattgttaattgttcaccaacaaagatcatattaatatcagcgatattattagttgttgcgatttggttaacaagctcggtactaccattgaatttttgcgcaatggttgaaagcgtatcaccatttgcaacggtataagttgttgcggcactggcttgtgattggttaacgaaaagtaacccggttgttgcgactgttgttaaagcggcactgtaaagtaaagtttttaaagatttcatattttgaatggactccttattgtttaaattgatttttctatctgtttaacgtgggactaatataccatcttaaatccgttagtaaatatcaaaaccataacaattgatgacaaatccgtaacaaaatgacggcaatttcacctaactttgtaatgaagcccacaatttaattgacctgtaatcgacctaaaagctaataacaccaaggattacagtcaataaaaatgctaaatatgctattttgaattaattaaccctctttcaaaaataaccgccctatttaacgtaataataagacgaggtgatcaaaatgaaagttttaaaattaaatgatttagatttaaacgtcgcattggatgatcgaatgattcaaatttctggtgctcaggacacaacattaattttcaaaagtaagctattagcacactattggttcttcaatttacgggctttagctaagattgcggatcgctatgcgatccaaatcatgtttgagacagagaactacaaataatctgccctatcgatatgaagccacaaaaaaagagctgattactcagctctttctatcttaattgggtatatagggctcgaacctataaattccggattcagagtccggtgccttaccaatttggcgaatacccaatatcatcaacgaatactatgatactgcacactccagacgttgtcaattatgatttttaacaaatctttaaaagaggactatactattcttggaggtggttccaatgatgaaaaaagcagaaatcgaaaaattatttgacgggaaagttgccgtatatgatcaagaccacgttgtgattgattggatagattcacgcaggacgcttgaagtcacaattgataacgatattctaaatctactgataaaccatcaggactatattcggaatatcttgaaacatttaaagagacaaacaaatcgcactatgaccaaggaaattattaacattaatcgtcgtaactataaaatcttcatttagcctcgctagagtcaattaaccattgacattacaggctttattcgctaagatattagttgttccgaacattgcccgttggtcaaatcggttaagacgtcgccctctcaaggcggagttacgggttcgatccccgtacgggtgatatttaaaacagcctagaacccagaaaagccgttaaactaaggtttagcggcttttttgtttgtttaaaacgtgtaaaaaagctagcctcctgacgctttagttagggggctagtttttttattgcgtagatttcttctattaaaatggcttcatttgccacaattatttggctaccaaaccagccactgattaaaccttccaccttactgggtacaataccttctattgaacgttctgctttgtcgatttgaaccggataacatttaacaattgcgtcattgatggtattagcaatcatctcagcagtcatcgcctcaatgtgtttttcattgcgcttacgatcttgtacgcggttattcttatctaacactgccgtatgatcgcttaaatagaacccttgccatttcatcatgccacgatcataataatcatacttcaaaaattgattaaccaaattgggatcatattcatcattattcataggcgttccctccagcatgcccaccgactaagccagcacgctcaattgcagtcgcaccttttactttgctagacaatttgaccactgatgtaaaaccgtagcgcttgcgaatttcatcgaccgtgctatctaatttctgctttttcaaattaataaactgtgtgtcgaacatatctaattgttccgcactatcgtcaaccaaattgctgcacgcaatactaatatgccgaatcgattcgtgttgccattcttcacgaaaaagttggatggcatgttttgtgagttgctgattagcattagtcgcatcaatcttcattgaacgcccaaaaccaccacgcgatgcatcctcttttgcagcaaatgaaaagccaatccccagactgataaccgtggtcgccttgtgatgcgccctgagacgtgcagccacttgctctgcaatttcccgaatcacaacttcaatctcagcttggataaaataatcgcgtggtaatacctgactattcccataagacttctctttggccttatatttatgccgtacaacggcccgatcaatcccccaactaaacgcaaacaactgcgcgcccatgacacccatttcttgttttaaccgatagggatttgtatgcgcaatatcgtacatcgaatgaatgtgtttctgattcagtttctctgccgtacgatgcccaattgaccagacatcatctaactgggtcactggccacagtttatctgggacatcttcataatgccattctgcaatcaaactgtgattccgtttggcctcaagatccaatgcgagcttggcaagtagcggattatcgccaatccccaccgttaaataaatgcccgtttctttttttacagccagctgaattttacgtgcgacttcgtacggcgtcgctccaaagagttgccaactatccgtgacatcaagtaacgattcatcaatggaatacggttgaatatcttcttctgccgtaaattgctgaaaaatacggttaatcttctggttcacttggatgtacaaattcatcttgggtggctcaatgattaaccgcttatcatgaattggaacatcccgggcacgcgttacgttactgataccaaataatttcttagccatgggactggctgccaatactaaaccactgcccgtgtttttctctgtggacatcaccaccaaaatagcctttaacggattcagtttcaaccgaacggcctctactgatgcgtaaaaagatttcgaatcaatcattaaaatcacgcggcgtagttcattctgatagtcatacacgactcttcaccccaacttgaatctgacgcacttgttcatctaattcgcgttgccaccgattaatctcaatcaaggtgacggctgatagatgacgataaataaattgcggaaacttatcgcggttgtagtaataattcattgagtcaatcaaatcatcactatgattcaccgctaatcgccgcaattctaaaactccaaagccatttaaatataaactcaatcctgtttgatctagcgtaatcacttctttattcgtatgcatcaggcacacctctttaattcatcttatgtcctcttaattatacgaacatacattcgatttagtcaagtgtgatttctcagagaataaaaaacgctcaatcaaattaaatttgattgagcgttaaaggaaccttaaattttaataccaaccgttacttaaccagaaactcttagcggcatcccatgaaccgtaacgacttgttacgtattgatctgcgacgcggtcttgattggctgctgaatagtcaccatttaaatatgatgcggttaattgataacggccaatcatttgaccgttacgcgctgagtatgaaccaccagattctttttgcgcaatccattctttcgctgaactagttgtcggtgcaacagcagctgtttgttgaactggtgtagcttgcactgtaggttgtgcttgaacaactggtgctggtgtttgaacagcggctggttgtgcaacaactactggcgttgtcgtttgaacaggggttgctgtttggtcagtgtcgattgttaattgttccccgacaaaaatcatgttgatatcttgaatgttgtttgttgtggcaatttgattgactaaatctgtgttaccggcaaatttttgggcgattgttgataacgtatccccagttgcaacggtataagtagtagcggcacttgcttttgattgaccaacgaaaagtaatcctgctgttgcagccgttgtcaatgtagcgctaagcaataatgtcttaaaagatttcatgtaatagatgtgctccttgttgttttgatttattaacgtgggactaatataccatcttatattcgcttgtacatgtcaaaaccataacaattgatgacaaacaggtaacaaaatgacggcaattcccgcgctaattgtaatgcacaccgcttacttgactgctattacacaaataacgcctaggacaatcttctgtcctaggcgttataaactaatttattgatgttattcacgacgttttaaatgatacttagagaccgatttttggcggccaagaactagcggaatacgttccacgaacacatcactatagtccaatccaaaccatgaagccggtgtatcagtgaatttttctaaccataaacgcatttgaacaatccctttatccattgctcgaatttgagttgctggtgataaatcttcttgcatgatcacaaacgagaaatcgccaacgttccgatttggaattgttgtgtagcgttgtggttgtgctggtaattctccccgatgaatcatttcttgaatgatttgacgaataaagatgttcactttttgttccatcttaaagcctagatacaactgaacgttgacaatgtagtccgtcccaagcgtatctgcggtatattctgccgtatacggttcatcagtaacattgaccgcaacaaaccagtaaacttgcgcccgttttggtcgtttatccaaaatagaataaagaatattcttcttaaccatattcttttcatatggtttattctgtggttttgaaagataaaccaaattagtcgtatacatagctaacgctgtatcgtctcgcaaatcatgtagttgttgtttataagctagtaatgaaaccgtacttgccttgaaagtattactttccttaatcgtattactacgataccaaacaaacatgatcgatagaataaacgccgcaattaagactgtcacgtaaccaccatgcatgaatttagcggcacttgagatgaagaaaataacttcaattgtcccgaagaagatgagtaccaaataagccaatacccatttcttctcgcggcgtcccaagtaatggaatagcaagatagttgtcattaacattgtaatcgtaatcgccaaaccgtaggcagcttccatgtgcgctgagttcttaaaatagaaaacaaccattaaacaaaccgcccatagaatccagttaacgattgaaatatagagttgcccttttaacttagccggataatcgaccttaattcgtggtaagaggcgcaacttgattgcttctgatactaaggtatatgaccctgaaattaaggcttgtgatgcaataatcgccgcaattgtagccagtaaaatcgctgggacctttaattgggctggcatcacttcaaagaatggattgaaatcagaaatatgttgatatgccgcaatatctttatgttgtaataaccaaacaccttgtccaaagtaattcaacactaaacaaagcgcaatgtatggccaactaccatagatattcaaccgcccaacgtgccccatatccgaataaagtgcttcagcccccgtagttgccaagaaaacactgcctaaaattagaatccccaccttattctcagggctaaacagtagttcaatcgcataatacggattgagtgccttgagcatcgttagatcccccattaagttaaccaaaccaatgccaccaataaaggtaaaccaaattaacataatgggaccaaaagatttaccgattagatcagtcccaaatttctgaatgaaaaataagaccgataagatcgagaccgtcaataaaatcacctgatcttgattattaattaaaacgttcccattaattggcaaaccctttaacccttcaatcgccgtcgtgactgtcacagcaggtgttaacatcccatccgctaataacgtcgccccaccaataatcgcgggaatcacgagccacttagcttgcttacgaatcaaagtgtacagtgcaaaaatcccaccttcaccattattatccgcacgcaatgcaatcatgacgtacttgacggtcgtcatcaacattaacgtccaaaagacaagcgaaatactgccgatgataaaatcgcggctgatgtttgccaaaccgccattcccctcaacaattgatttcataacatataatggcgacgttccaatatcaccgtaaacgacgcccatcgtaatcaaaatccctgcaactgataatttatgtccagttgtttgtttagttgtctttaatttcatgatttgttacttccttatactccaatatagcattatcgtagcttgttccagattgaaagtccagtcttatcatcaataattatcaatccactgtattccatgctataatagggacactgaaacaagcgagggatacaaatgaaagataaacgtcaatttgaaattgctaagaagcaatacaagaaactagcgaaccgaccactatcaaaggaacgtaagaaagctgttagtaccgcttcaacttacatgttcacaatcttagttgtggcctttattctattggttatttacttgttcgttcactaaaactgcgtaagcagtttttttttacgtatttttttgcagaacatatattgaatattatttttcgtacgtatataattaaataaatagctttttaagcttaaattactacaaaaaacgcgaacattatcgagaaaggcggctctcatgccctcaaaaaaacaagtttatctcgctggcccattttttagccccgaacaaaacgatcggttagatcaagtggctgatttactcattaaaaacccaacgattgatgctgattcacttttcaaaccaggccaacacccttatcctgatgcagaattcggtactttcgaatggcaagtcgctacttttaatgttgatacgcgtcaaattgaccaagcagatgtcgtagtcgctgttatggattttaaatctgaagaaggcgaattcgaacctgattccggtaccatgtgggaatgtggttatgcttttgcccacaataaaccagtgattctcgctcgttttcgtgataatttaccaattaacctgatgttggctggttctgcaacggccatcttcaatggtgaagcggatattgaaaacttagcgacttatgatttctttgaattacacaataaatatgttcaaacagatatcttttaactcaaaaaagaaccgactgatgcgtcggttctttttttttggcctaaaagccgttattctcgctcaattcacggtaccatcgaccgctcttcttcatcgtgcgctttgcctcatggtccaaatcaacacagtagaaaccataacgattccgataaccatttaaccaagaccaacaatcattgaaggtccaagtatgatatccaaaacaactgctgccggcttcaattgcacgatgtagttgcgtcagatgttcttgcataaattcaatccgatagtcatcttgaatttgcccatcttcacccataaagcgttcttcatcggcaacacccattccgttttcagaaacataccacggaatgttgtgataatcatttttcatcatcattgccacatcgtacaatgcttctggataaatctcccatccacgatatggattaatcttccgttctggccaaatataattagcatataagtcttccggtgtttgtgctgggaacttcggattctctggtgcttgaacccgcattggttgatagtagttcacgccgataaaatcgacacaatgatcggcaatcaattgccggtcgccttttttcgtcattggtaataactcatgttttgttaagaggttaattaattcttctggaataacgcccaaaacagttgggtctagaaaactcttagcgagtagtaagtcagcattttgtttagccattaaatcctctggtgcatcactcttagcgtaagctggcgtgatatttaaaataatgccgatctgaccatccggcttcacttttctaaattcagcaacagctgctgtatgcgccatcaaggtatggtagccaacctgaacagccttcttgaagtcaacaatgtctggataatgatagcccgttaagtaaccacattcgatatgcacgataggctcattaaaagtcgtccagcgatcaaccaagtcaccaaacaattcaaacgcagtttttgcgtagaatgcaaaggcatcaactgattcgcgtgtctcccaaccgcccttttccattagccaccaaggcatatcgaaatggaacagattaatgatcggtgtaatgtccacatcacgtaagcgcttaaaataatcccgataaaaatcaaccgctacttgattaacatgtttgctatcgggcattaatcgtgtccaagcaatcgatgtccgaaatgagttcaaaccaatcttttgcatattttcaacgtcttcacgatacaaccgataagtatcactagccgtgtcaggcccttgatcgctattaaacttatcaggttgcatctcaaaccatttgtcccaggttgatggggacttaccataacttagggagtatccttctgattgaggtgcggatgttgctgctccccacataaaatgctctggaaatttaatcataaacgctactctccttaaatgtaatcgccaacattttatattgtaccatttctctaaagtggtcgcacacctttctcagtcgattatttaatatgcgtacctccgaaatattatacacgttaaataaattgcagactgagattaataatatgcattattataaaataatttatttttttagggttttacacgtaaaagggttgtaaattcccgttattttatgatatattcaataacagaaatgattaatactcccccaagtaagatcatttcaatattcagaagatactcggtataggcctttcccaattaaggtttatgccgggtattttttgctttgaaagcaaaaaaaatagtcctgacggactatttttagaagcggtttgttatgcaaaaatcatttggaaaatacctgcgccacagatggcaccgataattggtgcaacaactggcacccaagcgtaactccattgtgagtcgcctttgttcttaagcggtgtgaacatatgcaccaaacgtgggcctaaatcacgagcaggatttaaagctggtcctgttgggccacctaatgaagcaactaatgtcatcaccaataaaccaacaacaatatggccggcagcgccaaacttacctgcaccaattgctaaagcaccgaaaactaagatcaatgtgcctaaaaattcatttacaaaaccattcatccggctatgagcagcatcgattgttacgaatgagcccaagattccttcttggtttgttgtgcgatcataatatggtttgtaagcagcaaccaataataattgaccaaccattgcacccaagaattgaacaatgatgtatggtaaaacattttcccaagggaataagcccatcactgcaaaacttaatgtaacagctggattaagatggttaccggaaatgctcccaaacataacggcaggaatcataaccccacaaccatatccaaaagcgattaaaaaccaatcactactaaaaccttttgttccttttaattcaacgttggctactgccccgttaccaaaaataatcataattgcagttccaataaattcggcagccaaacgggttgtcaaagaagcgtccactactattcctcctataaatgattcatatttttacgtatcatattataatacgggaaaatgcaaggaaaaacaattgacttttctgtttaaatccctttcatgagaagattcatatttttacagacctttctgtaaatttgacttgctaatatctcataaaatgggataatattcattgattaaccatattaaccctgattatccgattactgttttggaggttactatatgaacttaatactcgccatcgttctttatgcaggccttgctgtctttgcatttggcattatcctgctcctatttttcttaatttttaaaaaacggcttaaagcccctctaattatttgcttgattggtttgattatcgcggcatctcctgttggctataacttctacatggctcagaaagaacaccgcgaagaactagcgaagattgaaaagaaagataaaaaattcgataaagctgaacgccaattcatcaaacatattaaaaaatcgactgttgccactgaattcatcgctcaaaagtataataaagtttggggcgagttaacagaaaacggaacagttaacgtcgcaaatgttgattataacgatcatgatagtgctgttgctgctgaaggtcggcgtttactagcacaaggaaaactcgatgacgctgatgattactatgtcagtgctcaaggtgactaccaaaaaatgaaagactacgcgactgataacaatcgccaagaactcgtttacgccaaagatgtcttatccaagactgggtcgttcgtctctgttgcaacccgtccaaacggaactttccaagaatacactgatgatgtttacaaggctaatcaacgacatgtccgcgcaattcagaagttgaaattttcttacagtagtattaaatagtgaatatggtgattttgaaaaaaagatgaaatgggttacaatgaagtagaagactggggagtcttttattttttgattcatagttaaccctattatcgatttggagtgtgagaaatgcgtcacgtcaaattattattcatgattttaggtctaacttttattttaaccgcttgtgggaatcctgttaaagcaaagctccacgaaacaaacagtggcttcaatgcgcaaatcactggtaagactaagcataaaaaggtttattggcaaatcggtgataccattcatacgactaaaacaaccgatgatgctttcgcattcgaagtcccttacaaagctaagcagtaccggattacacttgctgataatgaagaaatgcgtaatccaacttatgttgaaggccctgtcgcaaaagaaattgtgcaatggccgaactttattcagatttataatccgattgcccaacaaaaaggactgggcgttttcgaagcgaatccacttgaaggcattcgcactgatcaagttgacagcaacaacgtgattgccatgaacgtcagtgatagcaaagtactggggatctcaattaaagctctcaacgcaggtaagaatctaacgtttaaaaactacgtcctcgccttttcaacaagtatcggaaccaaaccaacccagattactgaattggtcgaccgctcacttaagaaatctgggtcattaatgcaactgacggatcgcgaagttcgctataccgttatgacgaccaataacaacaagcaacaagtcacacaactttcaattaatcatttataaaaagaaagccgccgaatctacgattcgacggctctttttttatatagtggttaaaaaatttcgggagaaattattcacattcttgttatagggcgcagttcaatcaaagtaaacgatacggtcggcacaaattagtggtgccaaattgttatagtcactcaaccagctatcccctatcgaatttaaagtgcttatttacggcgtttcttcgtttaaaatgctatactgaaggtaaataaaggaggccttttttatgtttaattatcagcatattcttatcggtttagatggttctgagttatcagaacgcgctttcagtgaggcgattgaaattgctaaacgcaataatgccgaattagttgtggctcaaattattccagataccctttacacaaatgcacgcatgacttaccctgctgaaacaacgacatctgaaaaacatttcgttcaatcgtatcttgatcaaaaggtgcaattcgctaaagaacacggtgtccctaacgtacgagccatccttaaagtgggttcgccacgtcgtgaattagcctttaccatcccagaagaagctcatattgatttaacagttctcggtgtcagtggtaagggcgcctttgagcggctcttaatcggttctgttgcacaattcatcagtattcattctaacaccaacgtcttattaattaagccttaagccggtttaaagattggttaagtttaatgctttgtttttgacgtgtcccatttctaatatataataaaggtagtttaggagtggttcgaaatgccgtttgatatcactaaattgtctgatcaaaatattaagcgctggttcttacaacatcaccaagcaatcgttgcaacccttttgcacccaaacacttggtgggcaagttttaatcgccaattaatgcgctttttccaataatcactaaaagtgacgactgaatttgccgtggtcactttttttaatgacgtttttttaaaggagttctgatcgatgaccgagcaaacttatacttttacagcctcaatccaagccgcgacgattggtaaaggcggtgcatatgtctaatttcctggcgatatccgcgcaatcttcgggaagggtcgtgtaaaagtccacgcccttttcgaccaacaaattccctatgatggcagtattgtcaatatgggacttaaaaatccagatggcaacatttgttacattcttggggtccgcaaagacatccgtgcacaactcaaaaaagaaattggcgattccatcacagttgaaatccgtgagcggctatagctattacgcccctttaaatgctatactattttaaatatttatttcgtcgactaaatttagaatgaggattatcaaatgccaaaacacctttacaagcgcgtggcagtcgttttaatactgattaccaccctttttttatggcttttcacaggaccggccagaagtgaggccgggatttggttcttccataaaaccacaccccaaaaaattgttaagaaaaaaacacccaaaaaaattgttaagaaaaaaacatccaaaaaaatgatgctcgatatcacacctatttcacaatttcctgaattaccaaccggttgtgaaattacggctgttgccatgcttttagattaccgtggcgttggcatgagcaaaacagaagtggccgatagtatcccctatgtcaatgatggcgatatggaggtcggcttttgggggaatccatacgatgatactggctacactatgtatcctcctgcttggacaggattcttctatcaatatctcggcagtttcaccgatttatcggacgaaccgattagcacgctcaaagccactttaaaacaaaagaaaccaattgtcgcttggattaactaccataaacaaccagcgcattccgtcttattaattggctatgatcaaaattcatttacctttaacgatccatataccggcaaacgaaaaaaaatctcatttgataaattctggaaaattgctgcgccacagggacaccgtgcaatgacttattaatcattaacttgggggatttaacatgcataaacgaaccattgcagtcacgttcattactttaagtagtctttcattagctagttgtcggtcaattaaacctgatcaacaagccgtaacccactctgaaagtttagcacgctatcgcgcctcatcagaagcaaaagaaagcaatcagcgtcgatcaatcgctagctcgaaagaagcttctattaaacaacaatcagaaagtatcgttgcagcttcagaatctattgaacaagcaaaacaacaatctaatcagtcaacaagtaccaaaaaagcgctcactgccgaccaacaaacttctgttaatcaagcttttctagcgtgggcggctgggcgcgccacaattggaaacatggccgtcagtgattggtattttgaccacggtgctgccggatttggcgattggtttgccaattcacctgatggccgtattttagttcaacctgggacagcaagcccagggtttaatgcctaccctgttcatgcaattggtggctgtgtcttttacaccgctttggatggaacagtcggtaaagataatttagattgtggatcattcgccgataactacagccttaacatggcaatggacaaaccggttagcaaatacctactcggtgataacggcgtcgtgtatgaacttaatttaggtaatggtcacctcacatcaactaatgatggtttcagcgaactaaaagatgacggcaaacaagcttactcagaaccacttgcctttgccgtttctgaagacactgctgcccaagctgaactaaaatctttacttgcttaactattagagtttaaaggagcacgactatgaacaatgccgaactacaggcctaccttgaagaacattcccgcgtcatcaatacatttcgagccaaaggtttagactaccaaaatgaaaagaaccaaaaacgccaacctgccagacgttggaacgagaatagggtcaatcgggccgttgataaaatggtcgccgaatttatcgctagtattcaagtgaaaatggcattcaacattcgtggtgaacatgccaaagaatatcaaacttggttaacgttcattgaacaaaatgaagttgtcgaaggcttggaagaatcggttaatgaaatggcgtttgaataataaaaaaaggcctccccgactaagtgaagcttagctagggaggccttttgaatattagaaaaagtagtttcttttaacgaataattttccgcaaagtaattgcactggataatattaaggacgttgaattgttaattatccttgtgattttcttatcaatattatatgatttacttacgaaaggtggttttaaattatggttaagttattctttaacgacggctcaaaaattgcgctccaacaaaatgacacattatctgcctttggttctacgaatggtttacgccataagttgaccatcaaagactgtgctgctgcagatatcgtcgcaaaaatctcgcactttgttaaggacacgccggcttttatcctcggaaatagtcctagcgaaacttatcacagctcaaatctcattatgattactacacgttaattaaaagactgccgttgggtggtcttttttattttataactcaaaaacgccgctctcttgagcgacgtttttctttcagattaactttattgatttaaataattatataagccgcgcatggtcgcatccgccaacgttaattgctgcccatccaatgtcacctgcttaattgcgacataatcttcgaaatcgggtacttccagttgttgatttgcgacaaattcagccgctttttgataaaccttttcagcgttcgtttgaccgttgacatattgaatgactaacattgccatcatctccacttttacttttaatatcattgatgaattggtcatctttgataaggtcattatacttcgcttactaaaaataagcaatttatatattttattctttacccgtattaaacaaaaagcatttaatccatttattttagaacaatgcaccaaatactgcaccatttcataaaatcaatagactaaatgctttaataaaagtcgaattttatctttataaacgttgaattatagacgttcgtttaattctttgcctaattcttcaaagccaggtttgccaagtaatgcaaacatgttcttcttgtaagcttcaacacctggttggttgaatgggttgataccgttcaagtaacctgagattgagacagccatttcgaagaagtagatcatgtagcctaatgtgtaggctgtttgatctgggatgttaactgacataacagggacgccaccatcagtatgtgctaaaacaacaccttggtaagctttcttgttaacgaagtccattgtgtggccttctaagtagcctaaaccgtccaagttcttttcgtcagttggaatatcaatgtcgctgttagggttcacaacgttgacaactgtttccatcaagttacgacgaccttcttggatgtattgacccaatgaatgcaagtcagttgagaagttagcacttgaagggtaaatacctttttggtctttaccttcagattcgcccatcaattgcttccaccattctgagaagtattgcaatgttggttcgtagttttctaataattcagttgtgtaacctttgcgataaagaatgttacgtaaagcagcatacttgtatgcatcgtttttcataacatctgtatctgtgtattcagtgcgggcatcagctgcacctttcatcaattggtcgatatccccaccagcaacggcgattggtaataaaccaacggctgttaatactgagaaacggccaccgatgtcatcaggcacaacgaattcttcgtagccttctgcatctgattctgtcttcaaagcgcctttagcacggtcagttgttgcatagatccggcctttagcttcttctttaccatatttcttgatcaacttgtctttcaaaacacggaaagcaattgaaggttcagttgttgttcctgattttgagataacgttgattgagaaatcgcgatcgccgatcaagttaactaagtcgtttaagtaacttgaactaattgagttcccggcgaataatacttgtgggaagtcacgttgttctgctggtaacatgttgtagaacgtgttgttcaagaaatcaattgcagctttggcgccgaggtatgaaccaccgataccaattgcgatgaaaatttctgaatcgctcttaattttagcagcagctttcttaatgcgggcgaattcgtccttatcgtagttcactggtaaatctaagaaaccacggaagtcgttgcctgcaccagtgccttcacgtaattgtgagtctgcagcattaaccattgcttgcatttctgcaagttcgtttgattgaacaaatttgtccaaacgggatgcatcaaatgaaatatgtgccatattagtcttattcctcctgtttttaaacacaagtatacgttaataactttagcttttttagcgctaaaaagcaagccagattaaccgctttttcagcctagaccacctttattttcaaaagaaatttactcaaagtccttgacttgtttcgcccatcccgctatacttcgtatcatcaaataaaacggaggttactgaaaatgacaaacactcacttagtacaattgaatattcgttggcaaagccgctaagtgaggttgtatgccgttgtggatgcaatcttttgattgtatccatgcggccattcatcagtaatcgattgaattttaagcctacatggattttactcgaggaaatccatgtaggctttttctgtcccctacatgactgtcatgtgggggacttttttgtttgataaaatgagtgcgttcaaaccgggtatatttcgaacactagcctagtggtgcgaatgaacgacgcagtcggtcgtttgtgcgtcgtagctaggcacaggaatacggtttgaaaagcacgttaaaggagctttcgccatgtctaaactcaaacgttttttacccctcattctaatttttgggagtttgctcaccctacttggtatcaaaaaaatcaaagaagccaaccaacctaaattgccaattgtcgggattttacaacccttatctcatcccgcacttgatgaaattcatcgcgggattgtcgctggtctagcaagcgaaggctatcataacaaccgtaatatcaaaattgattttcaaaatgcgcagaacgatcaaagtaatttacgtctgatgagcaatcaattcgtcactgaaaaagccaaagtaacggtcggcattgccacccctgccgcacaaagcttagccaatgccactaagcaattaccgattatcttaggcgccgtgactgatccggcgagtgccaatctcgttaagaacaacgcccatcctggtgccaatatcaccggcgtatccgatcaagccccgattcaaaagcaattggcattaatgcaaaccatcatgccgcaactgaaaaccgtcggcattctctattcaagcagtgataactctgccaccagtcaaatgcacttattcaaacaacttgctgaacaaaaagggctgaccgttgttgaggccagtcttagttcagtcaacgatctggaacaagtcagccagaatctagtcccaaaagtcgatgcaatttacgttcccaccgataatacgattgctagtgcaatgggcaccctcgtccatgtgaccgacaaaaccaaaacgccagtctttccatccgctgaaacgatggttaaagatggcgggctcgcaaccgtcggcctaagccaatacgacttaggcgttgaaaccggtaagatgaccgccgccgttttaagtggtcgttcaaaacccgcaaccactccaattcggtatttacgcaaaggacatttagtcttaaacctcaaaaaagcaaaagccctccacatcacaattccgcagagtttaatgcaaatcgctaatcaaaaaggagctgttctcaaatgaatcttattatctcaaccattgaccaaggattattatggagcctactaagcctaggcgttttcatcacctttcgaatcttaaaattccctgacatgaccgttgaaggcagtttcccgttaggcgcagccctcagcgctttaatgttgcaacaacataacattgccttttccctattagtcgcattcatcggtggctgtttagccggactcgtgacggcaattttatacaactacttccatgtccagagtttgttagccgggattttaacgctaaccggtttgtattccatcaacttgcggattttaggccaagccaacatggcaattggtgatcaacacaacctatatcaactgccgctattccatcaattaacgctcgatcaacggctcttagtcattaacctagtcatcatgctgatcgccctattattactggctggcttactctacaccgaattcggtcaatccctgattgcagctggtgataatcccacgatggccctctcacaagggattgccgtaaagcggacgaaaacgattgggatcgtgctgtcaaacggcttgattgcccttgcaggtgggctcgttgcacaatataacggctttgctgatgtcaacatgggcatcggtgtgatggtcattgggttatccgcgatcatcattggtgaacggctccttgtcggcaagcatttcatcgccaaactaattagcattatcctaggaagcgtcgtctaccgcctcatcttactccttgtcttacaactcggctttaacgccaatgatttcaaactcttctcggccgtcattttggccatcttcatcatcgcaccacaacaaaagaaaggactgactaccaaatgaccccgcgtatgactttaaaccacctcaattttgaagttactgataataatgaacctaaacaactcttaaatgatttaaatctcacgattaatcctggtgaatttgtcgtcctccttggcgcaaacggtgcgggtaaatcgactttttttaataccattgcgggtgatttaacccccacaagtgggcaactactattcaacgaccacgacattacgaagcaatccgcccaacaacgcacacggctcattagtcgtgtctaccaagatcctaagttgggcaccgcagctgatatgaccgttgccgaaaatattttgttggcgatgcgccgtggccaacgccgccgcttatttccccggcgtctcaagcaacaactcccacaaatcaaagcgctcgccaagacactcccgaatcacttggatcaacaactcaatcgcccggttagtaacttgtcgggtggccaacgacaaacgttaaacttcttgatggcgacgattcaaaaacctgaattgctgttattagatgaacacacatctgctttagatgcagtttccagccaagcattgatgacttttaccaatcaaacaattcgcgataaccaactcacctgcctaatgattacgcatgatttagaggatgcgttgcaatatggcaatcgactcttggtgttaaaagccggtaaactgattgccgacttgaacgcgactgaaaagcaagcattaactgtcgatactttactagactatttaaactaatcaaaccgcgctaaccattttcggatagcgcggtttttgctgcttaaatccattcaatcttatcaagcaccaatttatcagcggttaattaattaaggatatgattaacctacgtttaacacttgtaatcgttttctaagtatgctaaattattcccataaggttgtgcgcaacctaattattgatttaagggagatctgtataatgacagttactactcaaaaaactattccagctagtgttgctatgcttagagttatcgaatcttggggcgttgatcatatctttggttaccctggtggctcatttaactcaacaatgaatgctcttaatattgaaaaggatcgtttaaaatatattcaaattcgtcacgaacaagttggggcccttgccgcagctgctgacgctaaattaactggtaaaatcggggttgcttttggttcagctggccctggtgcaactaaccttttaactggtttatatgatgcaaaagaagatcatgcaccagttttagccttgattggtcaagtaccaagcaagaacatgaactacaactacttccaagaattcgctgaaaacccaatgttctctgacgttgctgtttataaccgcctcgttatgacacctgaaagcttgccatacgttgttgataaagcaatccgtgaagcttacaaacacaatggcgtcgcagtggttgttattccaaatgacttcggctacgttgaaattccagatacaccatatagctcaagctcaccttcagatcgtaaaaaagtggctggtccagtcgcaacagacgaagaagttgatcaattcttagcaatggttaaagacgctaaacgccctgtaattcacgttggtcgtgggattaaagacggcggcgacaagctcgttgaattatcaaagaaacttcaaattccaatcgtcatgactgggcttgctaaagggttagtgcctgatagttatgaaggtaacttaggcatggctaaccgggctgcttctaaagcggctgatgaaatcatggccgttagtgatcttgtgattgccatcggtgctgacttcccatttgccaacttaatttatcggacacatgacttcaagtttatccaaatcgataacgatgaagcacaatttggccgtcaccatttcttagacttcggaatctggtcagatgcaactgcttttgttgaaaaagtaatcgccagaagcgaaacggttgccccaacaccattcttcaaagctgctgttgctgatatggcaaactggcaagcctaccttgatgttttaacgaaccgcgactctgatccgcttgaattcgaaccaatctacaaagaaatcaaccggattgctgaagacgatgctgtcttttcaatcgatgttggtgataatatcatcaacagtttccgtcacttgaacttaacgcctaagaacaaatgggtgatttctgccctctttgcttcaatgggttcaggcgttcctggtgccttagctggtcaattgagctacccagatcgccaagtcttcaacatctcgggtgatggtgccttttcaatggtcatgcaagacttgatcactgaaaagaaataccaattaccaatcattaatatcatcacatcaaatgccgcattaaacttcatcaagagtgaacaagatgatattccaatggattactcaggaatcttcattgaagatcaagattttgccatgattgcgcaagcaatgggcattgaatcaatcactgttcgttcttctaaagaattacccgctgcctttgacaaagcccttgaagtcacaaaagctggccgaccattcttaattgatgctaagatcactgacaaacggagtattccagttgaagaattagaactaactattaaagatggtaagataacagaaacaattagcgcaagctatgatgcttctcgtcctgctggcaaagaatacagcgtggctgatttcttcgcagaatacgatggtcaatcactgaagacattaccagaattatttgaagaaaacggtgttgaactataaaacaacccggccatcataaaaatagcgtctcaacacattgcggtgtgatgggacgctatttttattgatttaatttttggtaatggcttctttaggatggaaccaaacgacgttcttgtcgaagaatgagactaagtcgtttgataagtacaagatataggtgaagaataagacccaatttgagccaccctgcattgctgtaatgccccacaacgtgattgatacgatactttggatgaaccagaagtaatagctttctttaaaccgtaatgtggtcaacagtgcgccagtaaacccaactgaagtggcgatactatcgatcaatggtcgtggactgtccgtcatattactttcccagagatataataacccgactgatatagcaaagaacaatagcgtcaacgcccaattacgaagtcctttaccacgagtagcaagcccccggacttttttatcaacgttttgcgcccaatctggcattaataagactgggatgtctaacataataatgtagacggtttgtaataacatatcgttatagtttttagcattataagccacaataatgtagattaatgcagagatgacaccaaagacaccgtttaaaggtttcgtattcgtaatactaatagtacaggtgaagcctaacatccccgcgagcatcgttaaaaacgacacgccagtcattggaccaccggaaatagtagcagctaaaataaagcctaacccaaacatcaacaaaccataactggatgttgtccaccctttcatctgttgaatgtaccacttaggattaaatacactggtgattgcacgattgtcttgcattgaactgaaaccctctttatatgaatttagttatcactccagattgtcaacaccattttccatatattgatgtaccatctgacgaaacaacactatatatggtacacgctaagcattctaatttaaactcttgtatttaattcaatttgtggtagctgattttaaagcctttttgaaagtgccgttaacttacgattgcaagcgctgaactagaccattcgaaaatattttttatttttagcgttcgttgtcaagactcaattcaatctttgaccaatggcttaatagtctctttgatcaattgaccggagaatgacttcattaatgcccacattatctggtgtatcgatggcgttcattacggcattagcgacatcggttgctgttaatccagtttcagtttcactcttgagaacagctgctcgtaattgcggatcactaatccggctggctaattcggtttgcgcatgtcctggagagattaacgttgatttaatgcccattccaacttcttccacacgtaacccttccatcaccgcgcgcattgcatatttagtggctgaataaacggataagccttcaccagtgaaatgaccggcaactgaatccgtggtaatgatatgaccactcttttgctgttccattaaaggtaaggcatatttaatgccatatagcgcacctttgatattaatatcaatcatagcctcccactcatcgactttaccatcgcgtagcattgagacgggcattaagccagcattattgaatagtacatcaattctaccaaatttagcgattgtcaattcgattaaggcttgcatgtctgctaattgcgtcacatccgtttgctggtaaataacctcagtgtcgtattgagcggttaacgccgttgccaacgccgccaacgcacttgttcgtcgagccgctaaaacaagttttgcacctttggctgctaataaggtggccgtctctttaccaatcccacttgatgcaccggtaatcacaacgactttattttgaatatcattcatttcttttcccctcactttttagttgataaggttagtatatcgggtacttcgcaataaataattacgcactttcaactaactaacgcacctcaaagtaagttttgtgaaatcactaaaaagacgacaacattctttttgaataaatgttatcgccttctttaaatatcgtatttctcatggtctcgataatccaactgcacatcatcaccattgctctgtaaaaagtcgattctatcttcgccccacttggccatcattcctaggacggaaaccaatgatttgccgtacgcagaaatcgcatactccacgtgtgggggtacttcgttaaaaacttttcgagtaatgatgccatctcgttccaattcacgtaattgatcggttaaaactttggctggaattccctgaacgactcttttaagttcggccggtctttgaggtcctgccacaagatgacagagaatccacggtttccatttcattccaatcactgataaagtcattaaaacaccgttggtataatttttttgtggctcgttcaaggcctttcctccacttcttgatgctgatttgtttgtctatcataccatcaaaaaaaggatcaggacaatcttatctgtcctaatccctgattaattattctggtcgataagccgctttagcagcgttcatcgccgaccatgccttaggccagccgacataaaatgataaatgcgtaatcacttcgacaatttcagcttcagtaatgccgttttccttatcaatctttaaatgcgctggtaattattcaaaattaccacctgaaatcaaggcactgatggtgattaaactccgttgatgtgctggtaactctgattcacgcgaccaaacttgcccgaataaaacatcgtcgtttaattcagcgaatttaggtgcaaaatcacccaatagatcgcggcctgctgtttgtttctttgccattttaaaaacccctttctgaattaaagtgcgtcataaagcgcatttgaaacagcttctaaccattctggtgtgccggcagtgatggcgacatgactaaaccagctatccttagtggccccatgccagtgtttgatgccgtctttagtaacaatcacatctcctgggactaagtgttgtgctgctttaccttcttcttgataccagccttcgccaccagtcaccaatagaatttggtacccagcatgatggatgtgccaattgttccgacaaccaggttcaaacgtgacattcccgacaccgacattcacgtctggttcgctcactaacattgataaataactttgaccgacgaagaagtcttgataagccacattagcttctccaactgggaataattgtttttcttttaattgttcattcttaaccattctaataacctcactttattaggattcaaatcgttgtaaatacgtttcaaaactctctgcttgatcgatactctgatccaatttaccatcataccaatcaattttacgcgttaggatctgtaaatttgcttggcgctcagccaattcggcttcagcttgagcctttgttttttgcaataaagctttgcgcgcttcaatcgtcgcgtctccttgagcccgcaatgcaacatattgctttaattctgtaatccgcataccggtcccttttagatggagtataaacccgacccacttaacgtcctctaatgtataaaagcggacaccggccgcatcgcgttgcggcataatcaagccttggtcttcatagtaacgtaatgtgtaagtcgacaaaccaaccaatttagcaaactcgccgattttgtactgctcttgtgccatcgacatccctcctacaaaaatagcttataccttagagtatactataaggcaagttttttaataaataggacgatcgccatcaatattcggctgattaatgccccaacttgccccaattcctttttcaggatgattaactaaatcaacaacaacttgcgcgatactccgtcgtgaaataatcgtccctttaaacggtgttcccttttcagttaattcgtaatcaatccgatcttcattggtcatataggcacaacgtaaaatggtatagttaagcgaagattgttcaacaatcttcgccgcccgccgcgtgtcttccatgacttcatggccgactgcttgttcattccactcaccaaaagcacctggcacttcatgatacaagcctaatccactgatatagattaatcgtttgatgcccgctgcagtcattgtcgcgacaacgttttgcattaatggttcgaactgcccgcctaaatttgcgtaaacgatatcgaccccagctaaattgtctgccaacagctcttgatccaacacatcaccttcaataaccgtgacatgtggattttgtgctaatgcgcttagccgttcagcgtgccgtaaatatagcacgagctcatgttgattttctttcaacagttgctcaataactaactgggccacttgtccggctgcccctaatactaaaatgcgactcattttaatcaccccttcttcaatgtctttagcatattccttaaagtacactcgaaggcaagccatttttcaaatttaattggtctaggttgctacttgactttcaaattaaattgactaaaatgaaagttgttattaattataatcattataaagtgatttaagtaaaaaaacgggtttaatgattcagatgaaggactttaattagtgttgatctgagattattgacccgttttttaattttggatgtgctacaaatgccgaattggtaaggatgttaaattgtgtaaaatttaatttgggtaaaacgctttctttttggacatcggtaatctataatagttttcgaggaaacgttttcctaacattgttgttaaaggaggattaagatgactgaaaaatacattttggcgattgatgagggaacaaccagtactcgttcaatcatttttgatcacaatggtcaaaaagtcgccgatgcacagcgtgaattcccccagtacttccccgaaccgggctgggtagaacataatgcaaacgaaatttggaacgctgttttatcgacgattgcaaacgcttttatatcatcggggattcaaccccatcaaatcgcggggattgggattactaatcaacgtgaaacaactattatttgggataaggaaactggtttaccaatttataatgcggttgtttggcaatcaagacaaacaaatgacattgccgaacaattgaagaaagatgggcatgaagaattattccatcaaaagacggggctattaattgatgcttacttctcagcgactaagattcgttggattttagatcaagtgccaggtgcacaagaacgagccgaaaagggcgaactcctctttggaaccatcgatacttggattacatggaagttaacaggtggcgcttcacacgttaccgactatacaaatgcaagtcggacaatgttgtttaacattcacgatttggattgggacgacgaaatcctcaagattttaaacattccacgggccatgttacctgatgttcggtcaaactctgaaatttatggtgaaacagcaccttatcatttctatggtagcacggtaccaatttcagggatggcaggggatcaacaagccgcattatttggtcaattagctctccaaccagggatggttaagaacacctatgggacaggttcatttattgtgatgaatactggcgaaaaaccaacaatgtcagaaaacaacttgctaacgacaattggttattcaatcaatggtaaagtcaactatgcacttgaaggctcagtcttcgttgctggttcagccattcaatggttgcgtgatagtatgcaactggttgaaaaatcatcagattcagaagcagccgctaaggcttcaaccagtttaaatgaagtttatgttgtgcctgcctttacaggtttgggtgcaccatactgggactcagaagcacgtggttcaattctagggattacgcgtgggacgaaccgacaagacgttattaaggcaacactgcaatcattagcttatcaaactcgggatgtcgttcaaaccatgcaaaaagatactggcattgatatcaaagtgctccgcgttgatggtggtgctgcaaacaacaactatttaatgcaattccaagcagatattttgaatagctcgattgaaaaggcagctaatttagaaacaactgcaatgggggctgcatttttggctggtttagcagttggtttctggcaagatacagacgaattggcgcatattttctcagttgggcaacgtttcgaaccagaaatgcctgaagaagaacgggaagatctctatgctggttggcaacaagcagttgaagcaacaaaggttttcaaacatcgaccatataaaatgcgtgaatgaggaggattataatgacattttcattagaaggacgtcaacaagtaattaataacttaaagaacgaacaacttgatttattagtaatcggtggcgggatcactggtgctggggttgctattcaagcggctgcatcaggcatcaaaaccggtttgattgaaatgcaagattttgctgaggggacttcatcacgttcaacgaagttagttcacggtggtatccgttatttaaagactttcgacgttggggttgttgcagatactgttagtgaacgggccgttgttcaagggattgcacctcacatcccacggcctacaccaatgcttttaccaatctatgatgaacctgaagcaacttacgacatgttcagtgtcaagattgccatggatttatacgataaattggcaggggtaactggtacacaatatgccaactatacaattgatcgtaaagaagtactccaacgcgaacctggcttgaagtcagaccgtttgatgggtgctggtgtttatttagatttcgtcaataatgatgcgcgcttagtcatcgaaaatattaaagaagctgacgaattaggtgcatcaatcgcaagtcacgttaaagcagtcggaatgacttatgatgcaaacggtcgcgtaaacggtttgaaagcacacgatgaattaacggatgaaacattcgatattcatgccaaattagtcattaatactgctggcccttgggtggataaagtaaatgctttaaacacggaagtcaaagcacaagaaacacttcgtcctactaaagggattcatttagttgttgatagtagtcgtttatcagtgccacaaccaacttacttcgattcaggcttacatgatggtcggatgattttcgttgtgccacgcgaaggtaagacgtacttcgggacaactgatactgattacacaggcgatttcaaacacccacgtgttgaacaagcagacgttgattacctcttaaaagcaatcaacaatcgctatcctagcgttaatatcgctttaaacgatattgaagctagctgggcaggtttacgaccattaatttctaataacggtagctccgattataacggtggtggcgctaatagcggtaaggtttcagaagaatcattcaacaacttaatcaagacagttgatgattacgaaaacaaaacagctgctcgtgcagatgttgaaaaagcaatcagtcaattaagaacggcgcatgctgaagaatcagtcaacccatcacaagtttctcgtggtagtgatttgaaagtggctgaaaacggcttaatcactttatcaggtggtaagattactgattatcgtaagatggcagccggtgcgcttgaattaatccgggatatcttgaagaaagatttcaatgaaacagttcgtgaaatcgattctaagaaattacaagtttcaggtgggcacttcgatccaaataacgtggatgatacccttaaattctatgcaaaagttgcgatgaacaaagggattgatgaagaagatgcgattgatttagcaaaccgcttcggttcaaacgtcagccgggttgtttcatacgcggaccaaggtgctgctgaaggcttgaacttgaaagaaacaatcagcttaagatactcagttaacgaagaaatgacattaacaccagttgattatcttttaagacggacaaacttcatcttattccacaatgatcaattagcagccatcaaacaaccagttgttgatgaaatggcgcgtttattgaactgggatgacgctgaaaaagcacgtcaaacagaattattggattcagcaattgctgaagcacaattagactatttaaaataggacttaacttggaggaaatctcatggaacattcaataatggttcaggcgcttggtgaacttgttgggacgtttatccttgttcttttaggggatggcgttgtagcgggcgttagcttagcaaaaacaaaagccaacggtgctggctgggttgctatcacgcttggttggggctttgcggttactttaggggtatatacctctgcatttatgggacctgcacacttgaacccagcggtgacgattgcttttgcaatgattggcaagaccccttgggcagcggtggtaccattcattatcgcccaaatgattggggcgttcttaggcgcagttgtcgtttggattcaatactatccacattggcaagctactaaagatcaagcagcaatcttaggcacttttgcaactggccctgcgattcgcagcccatttgccaatttaatgagtgaattgattgggacattcgtcttaatcttcgctttactagcattaacacgtggtgaattaacagccggtttgaacccattagtggttggggtggttatcacagcaatcggtctatcacttggtgggacgactggttacgcgattaacccggctcgagatttaggcccacggattgcccatgcagtcttgccgattgccaacaagggtgattcagactggtcatacagctggatcccagttgtcggtccaatcatcggtgggattttaggtgcattactcttcgttgtattgccataacgataaaaaaacgattaaccaacaggttaatcgttttttttgtgtatttatgatttaaatacgaattattaaatatatttatgtaaaatagttcgtaaaatgttttgacatatcagatgaagattgttagaatcaaagcataatcaacaacgagaaagtgggcaaagaatatgagtgatgtggcacttgttatgggctctatatcagattggggaacaatggaacagaccgcttctgtattatcggagttgggcgtgagttatacgaaacagattatttctgctcatcggatgccggatgaaatgttcgccttttcaaaagaagcacaggcgaacgggtatcgtgcgattattgctggtgcgggtggtgccgcacatttgccggggatgattgctgccaatacagtcttaccagtcattggcgtgccaattcaaagtaaggcacttagtgggctggattctttattatcaattgtgcaaatgccaggtggcgtaccagtggcgacggttgcgattggtaaagcgggggccgttaacgctggtattttagcgacacagatttgtggcttgcaggtcccagcttatcaagtggcactgcaacagtatcaagcacggatgcatgcaaaggcggtggcaagtaatgcagactttgactaaccaaattttaccagggcaaacgattgggattgttgggggcggtcagttaggtcagatgatgacattagcggctaaagagatggggtttgcagtgattatcttagatccgcaggcagactgtccagccggacaagtcgcggatgatcaaattgtggcagcttatgatgatcaggcacaaattatgatgttagcgcaacgtgtcgatgtgttgacatatgaatttgaaaacgtcgatgctaagacgattgaagctgcccgagaatatacatggattcctcaagggacgaaggcgctacggattgctcaagaccgattgttggagaaacaatttcttgttgaccaacagctaccacatgccacctttgagattgtaacgacccctgcagaattaataccagctgttaaaaaagttggttttccttgtatcttgaagaccacgcgcggtggatatgatggtaaaggacaagtcattctacggtccgcaatggatatggaggtggctcaacagttgttaaccgctagtgtttgtgtattagaagcgatggtccattttgatcaagaaatttcggtcataattagtcagaattcagccgggcaacaagccgtttttcccgcaatcgagaatcaacaccgagataacattttacatatcagcatctgcccggcgcgcatttcagcggcgttagcggcacaagcggaatcggttgcggcaaaaattgccacgcagattgaattagtcggcacgttaggtgtcgagttttttgtcggccatgacgggcaactctacgttaatgagattgcaccgcggccgcataattcaggtcatctaacgattgaagcgtgtgacttttctcaatttgcaacccacattcggggcgtctgcaactggccactccaaataccacaattgtggcaatcagcggtaatggtcaatattcttgggcagcactggcaagcagcgctaacagccagtcggcagtcagcagattggcattatcacgactatggcaaagtggttcaaaaggtcaaccgcaagatgggccacgtcacgttattaacgccggctgttgatgaaacgttaacggcaattaaaaagactaaaatttgggactagaggggacgctaataaatgattgaacggtatacaaatcctgaaatgggtgcgatttggacggaccagaataaatatgaggcatggctggcagttgaaattttagcggatgaggcttggtcagaactcggacacattccggctgaagatgttgcgaaaattcgtgccaatgcgatgttctcaattccacggatcttagaaatcgaacaggaaacgcggcacgatgttgtcgccttcaccagagcagtttctgaatcacttggagatgaacgcaagtgggtccactatggtttaacatcgaccgatgtggtggatacggcgtatggttatttgttgaaacaagccaacaccattttgcgggccgatatcgatgcgctattggcggtgattgccaaacaagccaaacgttaccaagatacggtcatgatgggccggacgcatggtgttcacgctgaaccaacgacgtttgggttgaagctagcactatggtattcggaattaaaacgacataaggcacattttgaagaagctgcaaaaggcgttgaagccggtaaaattagtggggcggtgggcacgtttgccaatattccaccgtttgtcgaagcctatgtgtgcgaccatttaggaattcgcgcccaagaaatctcaacacaagtcttaccacgggacttgcatgctgcctacgtggctgaaatggcgttactagcaacttcaatcgagaagtttgcgactgaaattcggggtctccaaaaatctgaaacccgcgaggtcgaagaatttttcgcgaaaggccaaaaaggctcatcagcaatgccccataaacggaatccgattggttctgaaaatattacgggcttggcacgcgtgattcgcggacacatggtaacggcgtatgaagacgttgcactctggcatgaacgtgatatttcgcatagttctgccgaacgcatcatcttaccggatactacgattttgttggattatatgcttcgacggttcaccaaaattatgacggacttgacagtcttcccagaaaatatgaagcgtaatatggggcggactttcgggttgatttacagccaacgggttcttttgaagttaatcgatcatgggctttcgagagaagcggcttatgacttgattcaacctaaaacggcccaagcttgggatcaacaaactgatttcagaccgttattagaagcggatgaccggattatgaatgtgttgacgcccgctgatttagacgacgcgtttgattaccattaccatattcgccgcgtcgcagaaatctttgaccgcgttggtttgggcgaataatgatgaaaactttgaaatgaggttatttcaaagtttttttacaccctaatgtaacacgaacgattattttaattttaaataaaatatatgttatttggagggattcaagcatgagtgagacgttgttttattctggaaaagcgaaagatgtttttacaactgacgatcaaaatgtgttgagaatggtctataaggaccaagcaacggcgttaaatggcaaacgcaaggaacagattacgggaaaaggattattgaattatcagatttcgaaattaattttcaaatacttgatggcaaatggtattgaaacgcatttaatcgagaatatttcagcaactgaacagctcgtcaagaaagtgacgattgtgcccctagaagtagtattgcgcaacgtggtggcagggagttttgcccgcaagtttggtcaagcaccgggcaaacgattggccacgccgattatcgaatactattacaaaaatgatgcactagatgatccagccatcaatatttcgcaagccaccgcgcttggaattgtgacaccggcggaaattgaagtgattgaaaaacaaactaagcagatcaaccagctgctaatcgatttattcgaccgtgcggatatcgatttaatcgactttaagttggaatttggccggtatgacggtcgcttgattttggcggatgaattttccccagataactgccgtctgtgggatcaaacgacgcatgaatcgctagataaggatgttttccgcttgaacaaaggggatttagtatcggtgtacgatgtcgtattacgacgattagaaaaaattttagggggttctacagatgtttaatgtgcgtgtgcaagtgacttataaagattcggtgctagatccacaaggccaggctgtccaaaaagctatcgaacgacttggctttgatggtgtgagcggcatgcgcattggcaagtcctttgaaatgcaagtggctggcgatgaccaagccgcagttgaaaaaaaggtcgcacaaatctgtgatcaactcttagccaatcctaatatggaacaataccactacgacatacaaaaggtggcgacgaatcaatgaaatttgccgtattagttttcccaggttccaattgtgacgctgatttatatcatgcaattgaagatgtttgtcatgaaaacgctgagtatgtcccgtacacagcaactagcttggcaggttttgatgccgtattagtgcccgggggcttttcatacggcgattatttacgcagtggtgcgattgccaagttggcaccgattatgacggcagttaaggcgtttgcggctgctggcaaaccggttatcggtatttgcaacgggttccaaattttaacggaactcgggttattaccaggcgttcttttgccgaatcgacaaacccattttatctgtgacacagtcgcgttgaacgtgaccaatgccggtacgatgttcacccaacactatatgccgaacgaacaaattcggttgccgattgctcatggtgaagggaattattattgcgatgcagagaccctggaacggttaaaagtgaaccaccaaattgcatttacttatcaaaatgatgtgaatggtagtttagcgaatattgcgggcgttacgaatgaagccggcaatgtcttagggatgatgccccatccagaacgcgcagtcgaaaccttattaggtagcgatgatgggcaacgtttatttgcagcattaatcacatcgattcgaaaaggagggcaataaccgtgttaaagcaaccaacaccggcagaaatccaagccaccaagctttatcagcaatgggggttatcagatgatgaatatgaattgattcgtactaaaattctaaaacggttgccgaattatacggagaccgggttattttcagtgatgtggagtgaacattgctcatataaaaattcgaagccggttttgaaaaaatttccaacaagtggtcagcacgtgttgcaaggcccaggtgaaggcgctgggattttggatattggcgatggtcaagcagtggtctttaaagctgaaagccataaccatccctcagcagtcgaaccctatgaaggggcggccaccggtgtcggcggtattattcgggatattttttcgatgggcgcgacgccgattgcgcttttgaacagtctgcgctttggtgaattgacggatgaccacacgaaataccttgttcaagaagttgtggctggaatcggcgggtacggtaattgtatcgggattccaacggtcggtggtgaaatcggatttgatccatgttatcagactaatccactcgtcaacgcaatgtgcgttggtgtcatcgaccaaaaggatattcagcaaggtaaagcgcgtggtgctggcaatagtgtgttctacgtcggggctaaaaccggccgcgatgggattcacggggccacttttgcatcggatgaatttgcagatggcaaggcgacccaacgctcagcagtccaagtgggtgatccgtttatggaaaaactattaatggatgcttgtttggaattaattttgaagcatccagattggctagtcggcatccaggatatgggtgcggcgggcttagtttcttcaacagcggaaatggctgaaaaggcaggtactgggatgattctcaatcttgatcttgtgccacaacgagaaacagagatgtccgcttatgaaatcatgctttctgaatcgcaagaacggatggcgctttgtgttaaagctggtcatgaaacagatgtggttgccttgtttgaacgatatgatctggatgcggtccggattggtgaagtgactgagagtcaacaatatcaattgtggcatggtgggcaattagtggccgatttgccagtggcggctttaacgagtgatgcgccgatttatcataaagcacaaactgaaccagcacgcatcgctgaatttaaagcgatggcgccttatcagtcggtgattaatgatgttaaacgaacatggctcgatttattgggccaatccacgattgctgacaaacgctcgctatacagccactatgatgcacaagtgaagaccaataccgtcgttttaccaggaagcgatgcggcggtcgtccgaattcgtgggactaaaaaagcgctcgcgatgacgacggattgtaacgggcgttacttatacctcgatccaaaagtcggtgggcaagtggcagttgccgaagcagcacggaatatcgttgcggcagggggccaaccactgggaattacggattgtttgaactatggcaatccggaaaagccagaggtattctgggaatttgatcaaagtgcccaagggattgcggcggcctgcgaggttttcgatacgccggtcatctctggtaatgtttctttttataacgaattcaatggcgaagcgatttatccaacaccgatgattgggatggtcggtttgattcgagatacagccgacatcacgacgcaagattttaagtcagcgggggatttaatctacctcgttggccagacggatacgaatttagcgggttcggaactccaaaatatgttgacgggcaaagttgcaggacgattaagcggcttttcgttagccactgaaaaagcgagtcaagattgcgtcttagcagcgattcaaaagggctgggtgactagcgcacatgatttatcagagggtggttttgcggttgcgttagccgaaatgacttttaaagaacaactcggctgccgcgtgcaagtcccccttaatcaacaacagttatttgttgaaacgcaatcccgctttatcatcacggttcggccagaaaatcagacggcgtttgaagcgttctgtcaagatcaggcgcaattaattgggacggtctcggccacgccaattatgcaagtgcaaacgactgaatcaactgttgagttatcggtgactgaagcgaagttaagttgggagacggcgataccatgtcaaatgaaataaaaagtttaaatgaagaatgtggtgtttttgggatttggggtagtccagaagcaaaccaaatgacttattttggcttgcatagtttgcaacatcgtgggcaagaaggtgccggcattgtcactaatgatcacgggcacttaatgggttatcgcaatcgcggtttgttggcggatgttttccgcaaaccggagcacttaacccaactaaccggggacgcggcaatcggtcatgtccgttatgcgaccgctggtagtcacggtttagaaaatattcagccgttcctattcgattttgcaaccgatcaattcgcacttgcacacaatggtaatttaaccaacgcggtcacactgcgccgcatgcttgaacaatcgggggccatcttaaaatcgagctctgattctgaaattctgatgcatctgattcgacgtgcagaagggcctgatttgcacgcgcaaattaagacggcccttcaacaaattcgtgggggctttgcctacctattattaacgcaagattcattgattgcgatgcttgatcccaacggctttcgaccactctcgattggacgtttagcaaacgggggctacgttgtggccagtgaaacctgtgcgctcaataccgttcaagcaacttttatccgagatgtgcagccaggcgaaattgtgacgattgatgcggacgggttacattctgacttcttcacaaccgaaaccacgcattcaatctgttcaatggaatatatctactttgctcgcccggattctgatatctgtgggattaacgtccatgcggcccgcaaacgaatggggaaacagttagcacgcgaaaccgcagttgatgcggatatggtaattggggtgccgaattcatcgttatcggccgctagtggctatgccgaggaaagtggtttgccgtatgaaatgggcctcgttaaaaatcaatacgtggggcggacgttcattgaaccaacgcaagcccttcgtgaacaaggggtaaaccgcaaactcgccgtggttaaaagtgttgtggctggtaaacgaatcgttttagtggatgactcgattgtgcgtgggacgaccagcaagcacatcgtgaaacgtttgaaagaagcgggcgcattatccgtgcatttgcggattgcgtccccaccattgaagtacccttgtttttatgggattgatattcaaacacgtgatgaactgattgccgcgcatcaaagcattgacgagatgtgcgctacgattggggcggattcgcttggctttttaagcgaacaagggctcatcgacgcgattgggttacaacaagatgcgccgtattccgggttatgtatggcgtatttcaacggtgattatccaacgccactttacgattatgaagctgcctaccaggcaagtttaaaagcagataaggagtaataatcatgacaaacgcttatcaaaaagccggggtggatgtgacagccggttacgaagtggttcgtcggattcaaaagcaggtcggcgcaaccaatcaaaatattggtcgcttcggtggtcagtttgccttagcgatggggcagtatgaaaatccggtgctcgtttcaagtaccgatggggtcgggaccaagttgatggttgcttttgcagctgatgcacacgcgaccatcgggattgattgtgtcgcgatgtgtgtcaatgacattgttgcccaaggcgctaagccactttatttcttagattacttagcggctggtcaaacgcagccggataagatcgaacaaattgtcagcggcgttgttgcaggctgccaagctgctgacatgctgttaatcggtggtgaaacggccgagatgccgggtatgtatgctgaaaaacactatgatttagcgggttttgcagtcggaattgctgatcaagctcaattaattactggtgaaacgattcaaacaggggatgtattaatcggaatcgcgtccagtgggattcattcgaatggctactcacttgtgcgccaaattttcttcgaacaacatgggttgtccgtcgacagtcacttacccgaattgcctggtcagacactcggtgaatggctattaacaccaacgcggatttatacacaagcatgtcagccgtttatcgaacaaggctttattaagggcgcggcccacattactggtggaggctttattgaaaatataccgcggatgttgcctgacaacgtgatggccgaaattcaattgggaacatggccaagcttaccgatttttgcggcacttaaacaatatgggcaattggatgcactcgagatgtataacatttttaacatggggatcgggatggtcttagccgtcgcaccagaaaaagcggcacaagtcctcgcccaattgaacgctgaacaagaacaggcttaccgaattgggtcggttaaaccgcgacaagaaaatgcaatagaattggtgggttgatgagatgaaagtggcgatttttgcttctggaacgggttctaactttgaagtacttgcagatgatgacgccttaaaaaaagcgggcatggagattatgaatttagtgtgtgaccagccgggcgcaccggtgattgaaaaagcgcgccaacgaaatgtaccggtgacggtcatccgcttaagtgattatgatgatcgacaacactatgaagcagcaattgtcgcgctgttggcaccgttacagttggattatatattgctagcaggttatatgcgggtgattaccccagtattgttgcatgcctacccacaacggattatcaatattcatccatcgttactaccggccttttctgggttacgaagtattgaacgggcctatgcggcacaagtggctgaaacgggcgttacgattcactacatcgatgaaggtgtcgatagcggtccgatgattgtccaagcaaaagtaccattgttgcctggcgatagtttagccgcattggaacaacgcgtgcacgatacagagcacgcgatttatccgcaagttgttgctgaattaattaaaaaccaaaatagaaggagtaattcaatcaatgaaaagagcgttggtcagtgtttcagataaaacaggaattattgaatttgctaaaggattaatagcagctggttacgaggtgatctcaacaggcgggacattcaaggtattacaagaagcgcaagtaccagtaattgcgattgatgaagtcactcatttcccagaaatgttggatggacgggttaaaacacttcatcccaatattcatggtggcttgcttgccaaacgcgacgaaccaacacacatggccgctttagcagcccatgacatccagacaatcgatttagtttgtgtcaatctgtatccttttaaagaaacaattcaaaaaccagggattactgaagcgcaagctgtagaacaaattgatattggcggaccttcaatgttgcgttctgccgctaaaaacttcaaatcagtgtacgtggtcgttgatcaacaagattacgcgcaagtcctcgaacacgtcgtcgatgaggggcaagctgcagttgattaccgtcgttatttagcagccaaggcattccgccacacggcagcttatgatagcttaattgccggttatttaaccgaagcagtcggcatcgaattccctgaaaaattaacacgttcatacgactttaaacaagcgttgcgctatggggaaaatgcccatcaaaaagcagcgttctatcaaagcagtttaccaacggctttctcgattgcctcagcggtacaattacacgggaaagaattatcgtataacaacattaaagatgcggatgcggcggttaaagtggtcgcagaattcagcgaaccttgtgtggttgcgatgaaacatatgaatccgtgtggcgtcggcttgggtgcaaccatctatgaagcttggcaaaaagcctacgcggccgatccggtatcgattttcggggggatcattgccttgaatcgtgaagtggatgttcaaacagccgaagaattacacagtttattcttagaaattattatcgcaccaagctacaccccagaagcgttagccattttagaaaagaagaagaatttacgcgtcatgacgcttgattttgaggctgctaagcaagcggatcgcttcgaaatggtttctgttttaggcggcttactcgtgcaagaacgtgatcgggtgactgatcaagcatctgaattgaaggttgtgacggacaaaacaccaacggctgatgaacaagctgcgatgttatttgcccaacgtgtggttaaacacgttaagagtaatgccatcgtggtcgcaacaaaggaccaaaccctcggcattggtgcggggcaaatgaatcgggtgggctctgtgaagattgcaatcgaacaagcggaagccaatggattaaaagcaccgttcgtcttagcatctgacgcctttttcccaatggatgacagcgttgaatacgccgcagaacatggtgtgacagctgttattcaacctggtggttcgattaaggatcaagattcaatcgacatggccaaccaaaaaggaatcagtatggtgacgactggtcgccgtcatttcaaacactagccaataggaggcaaatcatggatctattagtaatcggtagcggcgcgcgtgaacacacgattgcgcgtgcgctacagcagagttcaactgttgcaacggtctattgtttgccgggcaatccggggatgcaattggatgggattcaaacagttgcgattgagatgactgactttgcagcgatgattgcctttgcgcaggccaaaaaggtcgcctatacgattgttgggcctgaacaaccgttagtggctggcgtagtggatgcttttcaagacgctggattagcgatctttggaccgcgtaaagcagctgcggcattggaagggtctaaaactttcgccaaagaaattatggcggccgcgcatgtgccaacggcggcttatcaagcctatcagactgtccaagcggcactggatgccctcgatgacgttcgttatcccgttgtgattaaagcggatggtttagcggctggcaagggcgtcgtcatcgctcaaaatgacgtgagcgcgcggcaaactgttcaggcgttctttgaacagggcgtgccccagttattgatagaagattatctcgaaggtgaagagttctcgctgatggcgttggtggcgaataatcgcgtctatccattaccggttgctcaagatcataagcgcgcctttgacggggatcgtgggcctaatacaggtgggatgggcgcttattgtccagtaccccagattagtgaccaatgcgttgcagaagcggtaacgactattttagaaccgattgtggcaacgatggctgaacgtcaaacgccttttaccggtgtcttgtatgcgggcttaattgccacacaacacggggtgaaagtgattgagtttaatgtgcgctttggtgatcctgaaacacaagtggtgctaccacggatgacgggcgactgggcccaagtttttgcacaattattgaagggggaaaccccaacgttacagtggcaattatcaggcattacgttaggtgttgtggtggcttcagatggttacccgacacaattgacaacgccgtttgttttacccactttgcaacaatttgcaaaacgcaacagcacatttagtttcgctagtgtcgcagaacaagccaatcaattggtcagcgctggcgggcgtttgtataccgctagttattctgctgagacgctaggccgagctagtcaacaggtctatcgggatttagcgcaactcgctttaccgacgactttttaccggcaagacattggatttcgaacgcaagtgaaataaccgagtataaatgtttgcttacttttgataagagaaccatgataaaggtattcaattattgaaagaaggaatctatcatgggatatcatacaagtgaagcggaaaatccaatcgatattttaaacttagcgtcgttagaaggacgcgtgaaagaacgaatggaagctggcgcgtttggctatatccgtggcggtgctgaagacgaatggacgatggctgaaaataccagtgctttcaatactaaaaaaataatgccccgtgtgttaaaaggcatcgatcatgctgatttacatactaaattatgggatattgatttaaaaacgccgattattcaagccccctcagcagcccaagggttagcacatgaaaaaggggaagtcgacactgctaaaggggtcgcagcggctggttcgattttctcaattagtacctatgccaatacattggtggaagatgcagccgcagcggctcctgatgccccccaatttttccaactctatatgagtaaagatgatcaattcaatgagttcttattgaaaaaagccgttaaggcaggtgtaaaagccattattctcaccgtcgattcaacattgggtggttatcgtgaagcggacatcgagacgcaattccaattcccactaccaatgcctaatttagcagcttatagtaattctgacggtgctgggaagggcatctctgaaatttatgctgccgctaaacaaggattagtaccagaagatattcaaaagattaaacaaatcacaaatttgccagtctttgttaaaggcattcaatcaccagtggatgctgaaattgccattcaagctggtgcagatggcatctgggtttcaaatcacggtgggcgtcaattagatggcgggcctgcttcatttgaagtgttgcctttaattgcgcaacaagtcgcaaaacgcgtcccaatcgtttttgatagtggtattcgccgtggtgaacatgtctttaaagcactcgcaagtggggctgatttagtggccattggtcggccaattatttatggtttaaatttaggtggcgcccaaggggtacaatctgtttttgaacacttaaaccatgaattatcgattaccatgcagttggctggtaccaagacaattgatgaagtgaaagaaacaaccttacttgattaatatggtatactgagagtccttggcaggggcactaaaaaaagcggttcaactcaatgatgagttggaccgctttttgacgttaacctaattatttaagatgggggagttcagctaataataattcgctagcgactaatccgagtaggctgacaataacgtacacccagtgagaaccactaccccagctgaatagataagcatcaacaccaactaaaatgataaagagcacgcaatttgtgattaagccgattttgaaagtcaattgactagcaatgacggcgaataaaacgattgaaatgaaaataatgaagaatgcagaaatcaaagtgacgaccacctaacgctatccgatttgaaatactacgctcattttactataaccgcagacgaacaacaattaaatttgtgggggataaagtttactttttgggtgttcgttaacagaatcttcaaatttacagtgtacactaggggatattcaactgatcaagggccgttatcaagccgattaatggacagacttttcactgagcggctatactatcgacaggtgaatttaattaaaagattgggggaactatcagatggttcgtgagacagatttacgagcgcaagatccacgtgttcaacgaacaaagcaacaattacgtcaagccctcattatcttgctgaaagacagtacgccaaaggggatttcgattcaagcaatcaccaagcaagcggcaattactcgcgggaccttttatctccattatgaagataaagtggatttcatccgaaccgcggtggccgatttggtggccgatttttatcagcaagtgactgtagtggtcgatcagacatatcgtcaggtcagtttacaggcactttttgaatatgttgaacaacaacaagctgcttttaaagtgttctataaaaatgaggcgacgcttcactttcaggcacaactgactgaatcaatgcgccaattaatgcaggattacgtggctaagcgctataatcagacttcacaggctgatcaaattgagatgagtattacgattgattatttagcgggggccagtttagcgttggtctttaagtgggtcaatgacgggcttgtgtattcaccacgctacatggctaagatgttataccaattggtacaaacacctaatacgacgttcgatgtcgcacaattttttgtcgaggcgtaataaagcattgactcgccctgtgatattcgatataatatgaacgttgtaattgtgagctccacagctgcaaccgcgcatactaaggcattaagtactatgattagtcaccttagttggcgagtctaagaaaaaataggaggtgcacacatgtacgcaattatcaaaacaggtggcaaacaatataaggtagaagctggtcaagcaatctacgttgaaaagttagccgcagaagctggcgaaaaagtaacttttgatcaagttattttagttggtggtgaaacaactaaggttggtacaccaaacattgatggtgttactgttgatggtactgttgaaaaacaagggcgcgaaaagaaagttgttactttcaaatacaaacctaagaaacacagtcatcaaaagaagggtcatcgtcaaccatatactaaagtgatgatcgacgctatcaacgcctaattgagggaaataagatgattcaagctgactttacggtcaatgccgattcgaaaattatttcttttcaaattacgggtcatgccgactcgggtccttacgggagtgatatcgtctgtgcagctgtttctgctgtctcaatcgggacaatcaacagtttgcaaaagcttgctggttttgaaccagaggtagaagcagataacctgaatggtggtttgttaacttgtcagattccggcaacggtttcgggccaagctttagcgacagctcagattctcttgcagaatttgcagttgacgcttgaagatattacgcaacaatacgggcagtacattcaagtacaaacaaaacgtaaatagacagttaataaacaggaggtgcatttagatgttacaaatgaatttacaattcttctctcaccataagggtggcggttcaacaactaacggccgtaactctgcaggtcgtcgtttaggttctaaacgtgctgatggccaaactgtaacagctggttcaattctttaccgtcaacgcggtacaaagattcatccaggtgaaaatgttggtcgcggtggcgatgacacattatttgctcttatcgaaggtgtcgttcgtttcgaacgcctcggtaaaaacaagaaaaaggtttctgtatacgctgcagaagctaaataattttttaaacacccactttgtgtgggtgttttttttgtgcgagagaagcggggctgtcgtcacattctaaacgtgttccatcagtcatatctctccggttaacccagagtcacaaatgattgctccacaatcttttgcgactctgggttaatcctcgagatatcccagactgatgtcacactctgtttgtgtaaatccagttttactggtatactaattactcaggcaacaaaccattgacaatctaaaagtgagtgttcagatcgacttttgctcgattgaatacgctaaaagggattggcgggtgccggtccctttttttatagctacttttagggataaaaggctagaaatacttgcttttgagcctgatttcttgctatgattaggacaatggcatacttatataatgcttggaggataaacaatgttatcagtaaatgattttaaaaatggcttgaccattgaatttgacaacaacctatggcggattgttgaattccaacatgttaaaccaggtaagggtggcgcttttgtccgctcaaaacttaagaatttaagaacgggtgccaatcaagaaaagacattccgttcaactgaaaaagttgaaaaagcaatcattgatacaaaatcaatgcaatatctttatgcagatggtgacaaccacgtcttcatggatactgaaacttacgaacaattagaattaccagcagcacaaatcaatgatgaattgaaatacttgaaagaaaatatgcaagtttctatcatgatgtatggtagtgaaaccttaggggttgaattaccaaacacggttgatttagcagtggctgcaacagaacctggtgttcgtggtgatacatcttcgggtggtactaaaccagcaacacttgaaactggcttagtggtccaagtaccgtttttcgttaacgaaggtgatttgttaacgattaacacatctgatgggagttacatctcacgggcataggctaaattagcaagaacttgttaggaggggtttcgatggcagaagaaacaaatattgtacttgatacacaagaaaatgcattgggcaagattcaaatggcacctgaagttgtggaagtgattttagggattgcagcaagcaagattgatggggtccaccaaatgcgggggacgttatcatcatccattaacgaattgtttggtcgttcgaatcacggtaaaggggtaactcttaaggtgattgatggcaaagtgaatgcggatgtttatgtttatctgaactatggtgtttctgtgccgaaggttgcccttgcgatgcaagaagcccttaaagaacaattattgttcatgactgatttagaactagcagaagtcaacgtacacgtggtgggcgttgtcactgaaaaagcaccaaaaattattgatccagatgacttatttaacgatgaaacacctgatcaaaatggagaccaatcttaatgcctaattttaaccgacaccaaattcgccaagctgcatttcaagtgttgtttgcgttaaatgctaatgacacattagaattggcagatgcttaccaagccgttttaaccatggatcaattcgatgctgaagaagttgaagaagttgctgttccagactaccttgccttcttggtaacgggcgtcacagaacatcaagcagaattagacgccgctttaacgccatacttgaagaagggctggcaactatcacggttagccaaaccggatttaattatcttgcgtttagggttgtttgaaatgcaaaattcaacagaagcacccgataaagtggcgttgaatgaagcgctcgaacttgctaaacaatttacagatgatcaagcaaaaggttttatcaacggcgttttatctaaattcgttgaagcttaattagtaaaatacgaacgaaatcacttaaaacacgttaaaaagtatttttttagcgtgtttttttgaatttaaacggtcattatcagctgataacccggaattaaccgattaactatgctaaaatagaaacatcaaatatcgataaataggggttgttaactttggaattactagatggtcgagcacttgcaaatgaattaacacaagcacaacaaatggcggtggcaacactcaaacaacaaggggtaaccccgaaattagtggtcgtcatggtgggtgatgatccagcaagtgcgatttatacgcaaagcaagcaaaaaagagcgactaaaattggcatggcatctgagttaaaacgcctgtctgctgaaacaacggaagctgatttattagcggttgttcgccaactaaatacggatgaaaccgttgatggcattttagtccaattaccattaccaaaacaaattaatgaagaccatattatccgggcgattgacccacaaaaagacgttgatggttttagcccagtcaatattgggcgattatggcttaatcaaccgggcttagtggcctgtacgccaaatgggattatgcgcttattggcagctcacgatattgacgtggctggcaaaaatgtcgtgattgttggccggagtaacatcgttggtcggccattggcagctttaatgctcaatgccaatgccacggtcacgattgcgcacagcagaacggcagacttaaaagccctaacgaaaacagccgacatcttagtggcggccatcggtaaaccacacttcttcggcattgaggatgtcaaagaaggggcggttgttgtcgatgtcggcattaatcggcttgaagatggaacagtcaccggtgatgtcgattttgaagcccttaaatcacatgttagtgcgatgacgccagttccgcgtggcgtggggccaatgacgattacgatgctcatggatcaaacgattgagattgcaaaggaacgtgctaaacgtggttaaaccaacagactatttaacagtcaccgcattaacgcagtatttaaaggctaaatttgaacgcgatccgtatttggatcgggtttatttaaccggcgaaatttcaaacttccgcttacgaccgaatgcgcatcaatattttagtttaaaagataataaagctaagatcagtgccattatgttcaagtccgcttttgaaaagattaagttcactcctgaagaggggatgaaagtgcttgttgtgggccggatttccttgtacgaagcaactggaaactatcagatctatgtggaacggatggagccagatggtcttggtgcattgtatcaagcctatgaacagctaaaagctaaattatcggctgaaggcttgtttgatgcaccaaagcaactattgccgcgctttccaaaacggattgcggtgattacgagtccttctggggctgttattcgcgatattataacaacgacgcaacgtcggtatccaattgcccaactcgtcttattcccagcggtggttcaaggtgacggtgcggctgatattttagtcgatcgactgaatcaagttaatcaacaaggggatttcgatacaattatcattggtcgtggtggtggttcgattgaagatttatggccgtttaatgaagaacgcgttgcgcgcgcgattgttgccagtcagattccggtgatttcatcagttggtcatgaaacggacacgactattgctgatttagtggcggatgtccgggcagcgacaccaacagcagcagctgaattagcaacaccggttttgacggacgaagtgttgaagttgcaacaacaacgtttgcggttatatcaggcattttcgaaaacattggcattaaacaaaaagcaattggtccacttacagaacagttacgtcttaaaacagccgcaacgcttgtatgacggctatttacaaaatgtcgatcagttgcaccgtcgtttattgttggcgcaacaacaacgcttacagactagtcaacagaatgtacaactcttgcagcaacgcctgcagtcgcaatcaccaagtggtgcgattcaacaagcacaaagaatgttgactgataccgatcatcgtttgaaacgagcaatcgagagccttgtccaaaatcggcggcaacaggctggacaagcggtggcggccttggatctcgtaagcccgttgaaaattttgggacgcggatttgcttatgtaacggatgataaccaaaatgtaatgaaaaaaatgaccgattttacggtcgaccaatcaatcgagttacatgtccaagatggcctcgtgaacgcgcgtgtcacggccactcataaaggagacgaataagatggcagaaaagaaattaacatttgaagagaacttagcacaattggaagcaattgtgaatgaactggaaacgggcgatgtgccacttgaaaaagcgatgactgcttttcaaaagggtgttaaattaagtcaaacattagaagaaaccttaagtaaggctgaaaaaacgatggccaaagtgatggcagataatggcgaagaagtcccattggatgctgaggcacaagaataatggttgatttcaaaacgtttgcgcgccaacaagtgcccgcatttgaaacctatttgactgagcaacttgctcagattgaagaaccaaccttgcaaaaagcgatgacctattcagtgatggctggcgggaaacgtctccggccacttttggtatttgcggtgcttgcaagtgcggggcgaccgattaatcaaatggcgtatcgcgtagcgggggcattggaattaattcatagctactcattgattcatgatgatttaccggcgatggataatgatgacttacggcgcggtcaacctacgaaccataaggtttttggcgaggcgcaagctattctagccggcgacgggttattgacacttgcatttgaatggttaacgacgaccgatttgacgactgatcagcagagccgcgctgttcgattattggcgcaagcagccggtccaagtggcatggttgctggtcagattgaagatatcgaaggacaaactaaaactttatcgttagttcaattgaaacaagtccatcagctcaaaacgggccgtttgattgaatgcgcggtcggcttaggtgcgattttggctgatttatccgatgaacaaatggctagtttacagctttttgcgcaaaattatgggttggcatttcagatccaagatgatattttagacgtgacaagcactacagaagcgatgggcaaggcggtccataaggatgctgacgaacataagaatactttcccaggcttattgggcttagccggtgcaaaagacgcgttggatgagacttatcaggccgcgcaaactgctttaacggatttatccgggttagataaagcactattaaatagttttttaaactattttaatgaataggagaacagatgaaaaaagaacgggtagacgtattattagtccaacagggattatttgattccagagaacaagcaaaacggtctgtgatggctggtgaagtgtacggtaaaaatgatgaacgaatcgacaaaccgggcgaaaaaatcgacgctgaaactgtcttaagtgtcaaagggcgtaagattccgtatgttggccgaggggctttaaaattggcgaaagcggtcgaggttttcaacatcgatttacaggataaaatcgcacttgatatcggttcttcaacagggggctttactgatgtggcgcttagaaatggggccaaactctgttacgcactagatgtgggctataaccaactagcatggaaattgcgcgaagatccacgcgtcgtagtgatggaacgggttaattttcgttacagtcaaccagaagatttcaccaatggtcaaccagattttgccatgacggatgtttcgtttatttcgttacataagattttggtgccgttgaaacccatcttgaaaccggactgcgaagcggttgctttaattaagccgcaattcgaagccggccctgaaaatgtcggtaaacacgggattgtgcgtgatccgaaagtgcataagatggtggttaaagacatcgttgattttagtttagcgacgggctacgacgtgctagggttagatttttcaccaattaaaggtggtgaaggcaatattgaattcttgattcatctacggaatacgacggctgagactggaacgatggccccaaacatgaatattgatacggttttagagaatgcctatgctgctttgaaacgaccaacgggaaaatagtgtataaaactttgtattttatgtataaatgcgctatcattgaggaatagaataatttctcacatgaagagggtgttttaatgcgcaaggtagatcggcaacgactgttaaaaaatttaatccagacccatgagattgaacgacaagaggattttgtgaagctgttacaagcggaagacatcgatgttacgcaagccacgatttcgcgggatattaaagaaatgcagctcattaaagtgccaaatgcggacgagggctatcactatagcctaccgcctgaaaagaaattagacgttaaagaaaagttgcgccggattttacgcgacgcctatattacgcataaccaacaagactattttgtcgtgattaaagccttaccgggtaacgggacggcaattgctaatcttttggatcaaatgcagctcagtggtgtatttggtacaattggcggcgacgacaccgtgttggtgatttgtaaatcagaagaaaatgctaaacagtctacgaagtttattgaagacttgctaaagtaatttggcaagtttttttagcatcaagagaaacgaaagggggatgatcagatgttacaagagttggtcattcacgattttgcaattatcgatcagttagcaattagttttgaagaagggatgacggtgctctcgggggaaaccggagccggtaagtcaattattatcgatgcagtcgggttactcgctggcggccggggttcacaagactttatccggactggtgctaaaaaagcgacccttgaaggcttatttacgatgacgcctaatggcacaaccgccgcagtattagaccagtttggcattgaacacgacgaacaaaccgtcttgttacagcgcgatttagccgttaatggacacaatgtttgtcgggtcaacggtcatttggtcaatacaaccactttgaagcatattggagaaaccttagttgatattcacggtcaaaatgaacaccaagaattaatgtatccagatcgccacttggggttgttggatgaatttgcgcatcaaaagttaacaaccgcgaaggcagcctatgccgaaacctatgctgcctatcgtaaaacacagcgtgccttgaagcaaaaacagcaaaatgaacaagaatgggcgcaacgcttggatatgctgaaatttcaaactaacgaaattgatgcagcccaattacaggctgatgaagaaagcaagttagtcgaagaacgagccaaactaatgaactttcaaaaaattaaccaagcattgcaagccagtcacacgattttagcaggagaagacgggaatgcgttagaccaaatcgcagttgcaatgaatcagatgcaagaaattgctgaactcgatccagaattcaagcgtattgcggacagtctgcagactggttattacacgttgcaagatagtagcattgatattagtcgggaagtttcaaacttagaatgggatgaagcacggttagatgaaatcgaacaacggctagaaactattaataatttggaacataagtatggtgattcaattgccgaaattctcgcttatggtgaaaaaatcggggctgaactagcagcgatgcaagcaactgaagcgaacgcaagtgagttggagcagcaattcacgcaacttgaacaacaacttaggacaaacggacaaacgttgacgcaattacgccaaaaagcagctaagcaacttgaaaaagcggttcatcaacagttaaaagcgttatacatggaaaagacggtctttaaagttgaattcttgccaaatgaacaggaacagttcatggcttccgggatggacaaagttgaattttacattcaacccaaccctggtgaaaaactacggccgctcgctaaaattgcttctggtggggaattatcgcgcttgatgttagcccttaaaacgattttctccgaatcacaaggcgttactagcatcatctttgatgaagttgataccggagtgagtgggcgtgtggcccaagcgattgccaataagattagtgaaattggccaacattcgcaagtgctctgcattacgcatttgccgcaagtcgcagcaatgagtgatcatcaatatcaaattcaaaaacaagtgaaacaaaatcgaacagaaacgtccgttcaaaaagtaaccggtaaacaacggattgctgaactggcacggatgttagcggggactgaagtaacagagttaactttagaacatgccgaagaattggtggcattagcggaaacggctaagcaaagtcgccgacattaaaataagggtgcagccaaaatatttttttggctgcacccttatttttttgcttaatttttcttttgaatgtaacgaatttgattgcaaaggacaatcttgtagaggttcgaacgactctcttttagcagatacttgttcgcactgagttgtttaaccaagcgcccggtcacttgttcgagatgatcgttaacattgaattgcaccgcaacatggtagtggcgttcaaacgcttgggtcataaataattgaatctgagcaggttgcatttggggttgttcaacaaaagcagtcgcttctggtgtaagttcaaaaaagcggtgatattgtttaaccaattgttgactgagtccgctaaccgttgcttgtttaaattccatgatttcatcctccgaacacttgtttgtgttttcattatacgaacaaacgttcagaattgcaagcggcattttttgatttttttcgtgtataataggatgaactgatagaaagggtgatttgatgggcaaaattgaatatgaaattatggcagaaatcggtgtgttgagtgaaaatccagctggttggcgtaaagaattgaatttaatctcttggaatcaacgtgcaccaaaatttgatttgcgagattgggcaccggatcatgccaaaatgggtaagggtgtgacgctgtcaaacgacgaaattgcgtccttaaggttaattttaaatgagatggaaacaaagtagacttgaaatttcccgccaaatagtgcagaatagactttaactattttataaaagaagagggaattacgtagatgtccaatcgaggaatgttgatcgttttatcaggcccatcaggggtcggtaaaggaactgtccgtcaagcaatgctagaagatgaatttcgtgattttcactattcagtttcgatgacgacgagaaagccaagaccaggcgaacaagatggtgttgactattattttgtgagcaaagaagaattcgagcaagaaattgcaaatgatggtatgctagagtatgcacagtacgtggataattattatggcacaccgatgaagtatgtgaatcagacactagactcagggcgcgatgttttattagaaatcgaagtccaaggcgcaatgcaagtgcgcgagaagtgtcccgatggcgtcttcatcttcttgacaccacccgatttattagaattgcggaatcgaattcaaaaacgcggcacagacgatcaagcaacgattgataagcggatgcaaaaagcagccgacgaaatcaagatgatggaaaattacgattatgctgtcgtcaacgacgaaattccaaatgcggttcaacgaatcgaaaagattatcgaaagtgaacacttacgagtgccacgtgtgatcgaccaatacaagaaaatgataggggaataataatatgattgtatatccttcaattgataagttactagaaaacgtgaactcacgttactcattggctgttttagctagcaagcgggcccatgaaatcgaagccggtgatattaagatgttatctgaatacaaatcacctaaaacggttgggatggcaatggaagaaattgctgctggcaatgtcattattgatcctgattcattgatgcttgaaaaagatgctgaaaaaatggataagctcgctcaaaaagacagcgaataagaataattaaagaacctgcatgtttagtttattcatcgatggatgtttaaattaaagtgcagtttttttagttttagggggttttgaaagtggatttaacgaataaacgaattgcagtttatgtgacaggtggcattgccgtctacaaagtggctaatttggtgcgtggattgattaaagcaggtgctgaggtccaagtggcaatgactcaggcggcaaccgaatttgtcacgccactgacgtttgccacattaacgcgtaaacccgtgttaactgatttgtttaatcaagaccaaccggatcgggttgcccatattcacttagcggattggactaatctggcggtgattgctccggcgactgctaatctaatcgggaaactcgctaatgggattgctgacgactttgtctcgaccgccttgttagccactaccgcgcccaaattaattgtgccggcgatgaatgaacatatgtggtttaatccagctacccaacggaatttaacccaacttaaagcagatggctatactgtcatggaaccggataccggctttttagcggaaggctatgctggtgtcgggcggttccctgaagaaaccgcgattatggcagaagttgcgcaacaattcggaccgcaacggttaagtgggcagaacgtggtggtgactgccggtgggacacaagaaccaattgatccggtacgctacattggcaaccgatcttctggtaaaatggggtatgcagtggcccaagcagccgtggcgatgggggcgaatgtgatcctcatcagtacgcgtccagaattgccagtgccggctggtttgcacaaaataatttacgttgaaacggcggcgcaattacaaggcacagttagcagtgtctttgaaggggccgatgttgtggtgatggctgcggcggttgccgattttaaaccggcccaatatgtcacgcacaaaatcaaaaaacaaccgaacacaactgagatgcagttaactttagaccgcaccccagatattttggcgacgcttgggcaacagaagacgcatcaattcttggtcggttttgcggcagaaacagatgatttactacaacatgcccaaaccaaactagcagctaaaaatgttgatttactcgtggcgaacgatgtcagtcagcatgatcggggctttggtgttgatcaaaatgcggttacgcttttacaaccgaatgcagtaccggaaacattagcgttggcggataaaagtgtgattgcgactcaaattctagaacgagttgctgagttgttagcttaactaaaaaggaggattcagatgccacaaatcgcaaaagtgattgtcgatgtgccgacgatgcaaactaatcggccatacgattaccaagtaccggatactttattagacagtattcaacctgggatgcgtgtggcggttccttttggcaaaggtgatcgattaattcaaggctttatcttgtccattcaagatcaagccaattttgaggggcaattaaagccgattacggcggtcattgatttacaaccggctgtgaattcagaattacttcaattatcaagttggttggcagagcggacctatgcctttcagattacgtgcttacaaacgatgctcccaagtgtgatgcgtgctaagtactctaagaccgcgcaactagttgatgaaattgatccagccttacaagcaagcctgttcaatggtaacgacgaattaacgtttgaccagtcgctagatcccgaaaagttaaaacaattgatgcagttacaacgccaagggaaaatcgaagtggtctaccatgtcgatgatcgcgcccgcgtgaagcaattaacggcgattgaaccggcattatcgtttgaacagttagaagaagcgcggaccggcttacgtaagtcagcgcaaaagcagagtcaactcattagttatttacaaagtttaattgatcaacccaatcccttattaaaggatgttttgaccaagacgacttttacccgggagaatatcaagacaggcgccgacaaaggttggttacgccaagttaaagttgaagcttatcgaaatccttatcctaaaaccgtcacgacgacgcaaaaaatggcgttgactgatgaacaggctgatgcggtagaagccgttgtggcggctactaaggcccaatctgatcgggtttttctagtcgaagggattacgggcagcggtaagaccgaagtttacttgcaaacgattgatgcggtcttgcaacaggggaaaactgcattaatgttagtccctgaaattgctttgaccccgcagatggtcaaacgcgtgaagggtcgctttggtgatcaagttgccgttttacatagtggcttatccgaaggtgaaaagtatgatgaatggcggcgaattgaacgcaaagaagccagcgttgtcgttggggcgcggtcagccgtttttgcaccattggagaatatcggtgtgattatcatggatgaagaacatgaagcttcctataaacaagatgaaagtccgcgctatcatgcccgcgatgttgccatctggcggagtcagtaccatcattgcccagtgattctcgggagtgcaacaccgtcgcttgaatcgcgtgcccgcgcccaaaaaggcgtctaccaactcttgcgcctgacgcaacggattaatcaacagccattaccggcagttgagttggttgatatgcgcgaggcgatgaagcaacaagccagcagcaacttttcacctgcactattagatgcgttgaaggatcggttgcaaaaaggcgaacaaagtgtcctcttgttgaaccggcgcggtttttcatcctttatcatgtgtcgcgattgtggctttgtcttgcagtgtcccaactgtgatatctcactcacgttgcatatggatacgcactcgatgaagtgccattactgtggtcatgaagaagcaattccgcggacttgtccaaattgtcagagtcgccagattcgctattttggaacgggaacacaaaaagtcgaagcagaactccaagagctgattccaaatgctcgtattctacgcatggacgttgatacaacccgcaaaaaaggtgcgcacgctaaattactcaaacgctttggcgaccacgatgccgatattttattaggcacgcagatgattgccaaagggcttgattttcccgatgtaacgcttgtcggcgtgattaacgccgataccgctcttgggttacctgattttcgggcaagtgagcgcacgtttcaattattgacgcaagtcagtggccgtgctggtcgtgccgataaaatcggtgcggttatcgttcaatcttttaatccggaaaattacgccatccaatttgccaagcaacatgattatgaaggcttctatcaatatgagatggcagtccgccatcggggcggctatccgccgtattattttacggtacagttaacgattagccatcctgaagaagcgttggcagccaagaagagtttccagattgcccgtcaattacggcccgtcttatccgaccaagcgattgtgctgggtccgacgccgaagtcgattgcgcggattaataatcgttatttctatcaaattgtgattaaatataaacaggaaccacaacttcaggcgaaactcgccgagattctcgaaacgacccaaattgatacccgtcatggtttcaagattgggttggacaatgaacccctacaatttacttaaagtgagcgtgattgattaatgacatccatcgtatttatggggactccccaattttcagtaccgattttagaagcccttgtggcacacgattatcaagtcctagccgttgtgacccaaccagaccggaaagttggccgcaagcaagtcctacaacaaacacccgttaaagaagcggctgttcgcttaaacctgactgtttttcaacctgaaaaactcagtggtagtcaagaattagcggacgtgatggccttgcaaccagatttaattgtgacggcagcatatggtcaattcttgccaacgaagttattagaagccgctaagattgcagccatcaatgtgcatggttcactcttgccaaaatatcgtggtggtgcacccattcaatatgctgtgttaaacggcgattcagaaattgggattaccatcatgcatatggctaaaaaaatggatgccggtgatatgattgaacaagccagcattccaattgaagcttcagacgacaccgggactttatttgataagttaagttatgtcggtcgagatctattattgaagacattaccaagcattatcgatcaaaccgcgccccggacaccacaagatgaagcacaagtaacgtttgcttacaatattactaaggaacaagaacaattagatatcgagcaaccagcaacgcaactggtcaaccagattcgtgcgttacggccacaaccaggcgcttggttgccaattaatggtcaacggacaaaattatggcaagcaactgttgctgaaacaacgacggatcaaccagccggtgtgattgtcgctatcaacaaaaaggatttcgaattagcagccggcaatggcagtgttttgaagattaccgagattcaaccagctggtaaggctaaaatgccggtccaatctttcttaaacggggttggcaaacaactcgcagtcggacaacaagtggtggtgcaagatgcctaaaaagacaccacgctatttagctgttgaaattttaacggcggttgccaaacaaaacagttattcaaacttggccctcgaccaagtgattaaacaaaaccacttgaatccccaagatgctggttttttaacgcagctcgtgtatggtgtgattcaacatgaaatgacactcgattattacctagccccctttattcaaaaaccagctaaactggcaacttgggtccgccaagtcttacggacggcagtttttcaacaggtttatttggatcgtgttcctgaacatgcgattttttatgaagcaactgagattgccaaacaaatgggccatgctggcacggctaagttggtcaccgcaattctacggaaccaacaacggactggattgcctgatttagcagcaattgccgatccaatcgaacgcctaagtgtgacttacagtatgccgcagtggttagtggcgaagttccaccaagaattagggcaatcaaaattggaacacttattggcaacgattaaccaaccagcgaatgcgtccattcgagtcaatacccgtgttaattcagttgatgccgttttggcagacttacaggctgacgggttaacgattggaccgagtgtaattgtagccgctggattagttgcccacggcggtcacttagccagcggtgaattgttcgaacaaggcgcgtatataattcaagatgaaagctcgatgttagtggcaccaagtttgcaactacaaccaagtgatcggatcttggatgcttgtgcagccccaggtgggaaaacgacacatatggcgacttatttggatgccagtcaaggggggcaaattactgccttagacattcatgaacataaagtccgcttgattgagcaaaacgctaagcgtttgcatgttgcagacgtcattgatgcgcgggcgctcgatgcacgcaaagtcggtgaacaatttgaacctgaaacatttgataagattttagtcgatgcaccatgttctggcttaggcttaatgcgacgtaaaccggaaatcaagtattgtcgccaagcagcagacttattgaaccttcaaaagattcaattggcgattttagaagccgttgcaccaaccttaaaagtgggtggtcaattgacttacagtacctgtacgattgtcccagaagaaaatcaacaagttgttgcggcttttgtggccaatcatccagaatttgaaatcgtaccagtagcactcgacaaaccattgccagccaatcaagcgacaccgtttgtccaaatctatcccgatgattatcaaacagacggctttttcatcgcttgtttaacacgacgggcttaaattattaattgaggtgaattcttatgaaagttgcttttcaaaccgatgtcggccaacaacgccaaaataatcaggactatgtcggcttttataccaataaaagcggtgcgcagtttgcgattgttgctgatgggatgggcggtcatttaggcggcgatgttgcttcagaaatggcggtttcccatattgggtacgagttcgaacgaactgatgataccgacattgaatccatggttaaatggttaattttcgaattacaaaaagaaaacaaacatattttagcgaaggctaatcagtatgatgatttgtttgggatgggcaccacgctcgtcgcagtgttgatttcaggtgccaattacttagttgccaatattggcgacagccgagtgtatcgcttccggaataacgaactccgccaattaacagaggaccattccttggtaaatgaattggtgaaacaaggggagttaaccgaagaagcggcaaagcatcatccgcaaaaaaacatcattacgcgcacattaggcgtttcgcaagatgtcgatgccgatgtaacaatttacgaatttgaaccagatgattatctattattatgtacagatgggctaaccaatatggtcgatgatgaacaaattaagaccacgctgatgacaccgacatcgctggaagaaaaatgtgcggcattaattcaacaagcaaatgatgccggtggcttagataatattacggcgttaatcttacatcaaactggtgaggagggtgcgcgatgatggagacaggctacgcggtcaatggccgctatcagattatccgtccaattggagaaggtggcatggccaacgtttatctggcccaagatctgattttggatcgccaagtggcggtcaaggtgctgcgacttgatttacggaacgatccgaacacggtacgtcgctttaaacgcgaagcacttgccacaactgaattgaaccaccccaatatcgtcagtatctatgatgttggtgaagaaaacagcatgcaatacatcgtgatggaatatgtgaagggaacagatttaaagaagtatatcgttgaacacttcccgattccttatcaacgcgtcgtcgatattatgacgcagattttatcagcggtcgaaaatgcccacgcgcacgatattattcatcgtgatttgaaaccacagaatatcttggtcgatgaagcaggtaacgttaagattagcgattttgggattgcgattgcgctcagtgaaaccgcgatgacccagaccaatacattactcggatcagtgcattatttatcaccagagcaagcacggggttcaatggcaacgaaacgttcagacatctattcactcgggattattctgtatgaaatgttaacgggtatggtgccatttgaaggtgaatcggctgtttccatcgcgattaaacattttcaagatgctgtaccacccgttcgagattatgatccgcggattccacaagctttggaaaacgttgtgttaaaagcaactgccaaagatccggacgaacgctacagtgatgttgggcaaatgaccactgatttgagtacctcattatcagctagtcgggcgcatgaaccgaaattcgtgccctcacaaggtgatatgggtgaaacaaaggtgattccggctctcgacccagaagggattacgcgccaaaacgatgcgccagaagccaaacccaaagatgagactgaagtaaaagacgatcagaaaaagaaacagccgcataagaagtcgaagcggaaatggtggtttgtggggcttggcgtagtcttgttagtgatgctcggggtcttcgctgcgtacgcaatgcaaggcagtgaagtgactgttccagatgtgacagacatgacgcaagaaaacgcgactgcagcattaaccgcagataaattaaaagttggtaagattcaaaaaactactagcaataagtacagcaaagggcatgtgattttatcgacgcctggtaaaggaatgcatgttaaatcgggcagtacggttgatctaacaatcagtacgggtcgtaaaaagtatgagatcgaagactatacggacaaaccgttcacagatgtcagcacgttattgaaacaaaagggactgacggttgtgcgcaaatatcagagttcacgcagtgttgcttcgggactggttttagaccaaagcattgccgcaggtgaaaaagttgtcccaagtaagacgacgattaccttgactgtcagcagcggcaagccaagcattactttacgcaatttgagtaattacacgaaacaggctgttcaagactatgttgatgacgttggtttgacggttactttttcagaggattactccaatacgattgatgaagggttagtcattagccaatcacctggtagtggtgcatctattcaagaaggtgccaatattaacgtggtactttctaaaggtaaaaaagcgcccgctaccaagagttttacgaagtcgattacgattccgtttgataattccttagcaacttcacaaagtagtacaagcagctcgagcgaatcgggtgacagtagtagtacgagctctagttcaagtagtacttcaacggctacgacgaataagattacgatttatttagaagatagcacgcattcaataatgagtgtttataaagaaatgacgattaccgcagatacaaccgttgaattgccatttacgattaaagcggaccaagccggccgtttccggattttaagaaatggtcaagagattctatctgatgaccatgtgacaaactaattgggaggtgacctattgcagacaggacagattattcgcgccctcagtgggttttatgatgtacaaagtgaaggcaaaatttatcgaacgcgtgcgcgtggtaatttccgtaaacggaaaattacgccacttgtcggcgattttgtcgaattcgagagtgaaagtgaaacagaaagtggctatattcttgagattttagaccgtaaaaatgagatgattcgaccaccagtcgctaatattgataatgctgtcgtaattgtttcggcggtggaaccagcattctccttgaatttgttggatcgcttcttgatttatattgaatcgctgcacatgcaagggttagtttatttaaccaagaccgatatgattagtgatcaacaataccaagaaattagtgattacttggcgtattacgcgaagatcggctatcaaatttttgcaccgcggaccgcctttacaccggagataattacggcaattgaagacacgttcccgcataaaacaaccgtctttacaggacaaacgggggccggtaagtcaacgttgttaaaccacattgacccgagcttgaatattgcaactgccgaaatttcgcagagtttaaatcgtgggaaacatacaacccggcatattgaactgattccgttgaatgatgggttagttggtgatacgcctggcttttcatcacttggtttattaaacgtcacgattgaaaccttggttgaccgattcccagagttcagagaaatcgggcaaggatgcaagtttagaacgtgtcaacacgtgatggaaccgaaatgtgccgtgaaagaagctgtcgacagtggcgaaattatgcaaagtcgttatacgaattatttacagtttagagcagaattaaaggatattcggccagtttacaagaagtcaaaataaaaatgtgatcggagttttgatgatgaaacaaatcgcaccttcaattttaagcgcagactttatgaacttacaaagagacgtccaaaaccttgaaaaggcgggcgctgatctattacatgtggatatcatggatgggatgtttgtccccaacatgtcgtttggcccccaagtagtaactggcttgcggccattgacaacgttaggcttagatgtccatttaatggtggaacaaccagaacgctacatcgaacaatttgcagcagctggttcagacttaatcatgattcatgccgaagcaacgcaacatctctaccgtggtcttcagatgattaaagatgctggtgttaaagcaggcgtggtgatcaatccagggacaccagttagtgcgattgaaccagtcttatcattggttgatcaagtcttagtaatgacggttaatcccggttttggtgggcagaagtttattccagcgatgttggataaggtcactgaattagcgacttatcgcgatcaacatactgatgcagattatacgattgaagtcgatggtggggttaacgaccaaaccatcggtgcgtgtgccaaagcaggcgcagatgttttcgttgccggttcatatacgtttgccggtgatttagcaacccggattgcaactttaaagcaggctgctcatgacgcggattaatgtgttggtgggaggaccagtcagtgagtgggcccccgaattggcgcagccagaaatgattgatggtcaatgggtgacagcagaccgtggtacgtggcgcttattgcaaaaaggcgtaacacctgtcgtgtcagtcggcgattttgattcattgacggcggctgagcggaccaccgttcaatcagcagtaaaggatattcgctctgtgcaagcagaaaaagatgataccgacactcagttggcattatcaattgcgctaactgaatttaatgcggatcaagttgtgctttatggcgcaacaggcggtcggttggaccattttcttgctaatctctttatgcccttagaaacacgttttaagccgtttttagaccggttagagatgcgcgatcggcaaaatacgattcgcttttatgcaccagggacgtatcaattacaaaaagaagccgataaacggtatctggcctttgtgccattagttcccacaactggtttaaatttaattgatgaaaaatatcgcttggtggattaccaaacgcaagtcccgatttcatgggctagtaatgagttcatcggtgagaccggccaattcagttttgaaactggggtggttgcggtgattcaaagtaaggattaaaaagacggctcggataaaattattttatccgagccgtctttttggttgccataaacgtgttcgatcagtcatctcccgaggattagccgacttatctcgtactctttgccaaaaaaatagaccgccaactggcggtctatcaattgaaattatacacgagttactttgcctgatttcaaagcacgggctgaaacccaaacacgtttaggtttgccatcaactaagatacgtactttttgtaaatttggcttccaagaacgacgagatgcgttcaaagcgtgtgaacgcttgttgccaaatgatgttttacggccggtaataacgtcttttgccatggtcttattcctcctttaagtaaagccggtagaattaacgagaaacataatatgattcagttagtcttaatagttgcatgcatgcacaccggcttatacaattcacttaaataatttaccataatagtttggggaatgcaagagctctttcaaggaaatttacttgacagtccaaaataagtcgtttaaactcattagagtccaaaaataagccgcatttggggaagaattcatcaccagttgctttgcaactcttctccgctatgctaaaataacaataagtatggcacaaggaggctattttaatggctgttaaaattaaaacacaatatggcgatattgatattaccaataacgtgattgcaaccgtcgttggtggtgctgcaacagatatctacggaattgttgggatggcaagtaagaatcaaatccgtgacaatttaaacgatattttgaatcgtgagaattataatcggggtgtcgtagtccgtcaagaagacaatggcgttgcgattgatgtctatattattgttggttacggcattaagatctctgaagtttgccgtaacgtccagagtaaagtgaagtacaatcttgaaacaatgttgggtgtcggtgcgaactcagtgaatatttatgttcaaggtgtacgggtattagaagactaaaactaattagcggagctggccactaggtccagttctatttgtttttgttcaaggaggaacattcgtgaaagttactgaaatcacagcagcagaattccaagcaatgatgcgggttgctgcacatcggcttactaaaaatgcagaatttgtcaattcattaaacgtctttccagtgcctgatggggatactgggaccaatatgagtttaacgtttcaaagtggggccaaagcagttaatgaaaacaacgcgcaatctgtcggtgaattatctaagagtttagccaaggggcttttgatgggcgctcggggtaactccggggttatcagttcacaaattttccgtggtttttctaagagcatggctgaaaaagaaacgttggatgcacaagatttggctgacgcattcacaaatggtgttcaaacggcttataaagcagtaatgaaacccgttgaaggcacgattttgacggttgccagaaaaggcgccaaagctggtgccaaggttgccggtcaaactgatgatatcggtgcagttatcgaagctgttgttgagggttctaagaaggccttgttgaagacccctgaattactccctgtcttaaaagaagtcggcgttgtcgattctggtggtcaaggattggtcttcatctatgaaggtttcttagaaggtttaacaggccaagcacctgcaaaagatctttacacacctgatgaagcggaaatggatgaaatggtcaatgccaatcatcatcaaaccgctcaaatgggtacagaagatattgaaaatggttattgtactgaaatcatggtcgcccttggtgatgggacaactgtcgatcgcgaatttgattatgatgaattccgcaatcatttaaacggtgttggtgactctctcttagtggtagccgatgaagaagtggtgaaggtccatgtgcatacagaacatccagggacagtcatggcttacggccaacactttggttcattagtgaagattaaagtcgataacatgcgtttacaacatgatacgattgttgaaaacgaccaacaagctgctgcccctgtgcaagcagaacctgttgaaaatgggattatcgcgattgcggccggtgatgggattgctgaactcttcaagagtttaggggctacttatatcttaagtggtggtcaaaccatgaatccaagtacgcaagatattttagatgcgattaaagcagccaatgctaaacaagtgatcttattaccaaataataagaacatcttcttagccgctgaacaagctgccgaagtggctgatattccagttgcaatcgtgcaaagtcggacgattgctcaagggatgaccgctctcttatcatttgacccatctgctgaattggctgctaatcaagaagcaatgacagaggcgttagataccgtgattagtggtcaagtaacgcaatcaatccgggacacgactttagatggacttgaaattaagaaagacgattacatggggattatcgatggtaagattaaggtctcaacggctgaacgtttaacagcagccattgaaatggtccaaacaatgcttgatgaagacagtgaaatcgtcacaattattatcggggaagacggcgatgcaacagaagctgaacaaattagtgatgcaattatggcccaagacccagaattagaagttgaagtacacgaagggaatcaaccagtttacccatacttgatttcagttgaatagttaatcaaataaaacgggaatgaggttgaatatacctggttcccgttttttagtagaagtacgtttaaccttggaatatggttaaaaagcacgttaagaaaaagaagtgtatcaaaagtgcttatcctgtgaggattagtttaattagccgaatgactagcgtagctacttgtttggctaatggtgctaaacgcaacaggatgcttttgaaagcacgttacaggaggctgtcaatgttaagtttaacggattctgttgctgtgttagctggcgtcggcccgaaacgtctgacagccctcgatcagcttggcataaggaccattagtgatttattgtattattttccgtttcgttacgaagatttgaaggtcaaggatttatccgaagcggcagatcaggaaaaggtgacgttaaaaggaacggtcgtcgctgatccggtcatcagtcgttggggaccagggaagacccggctgaatgtacggctcttgattgaacatgacgttgtgatggttactttttttaatcaaccctatcttaaggacaagtttgaagccggggtcgatgtcgctatttatggcaagtgggatgctaaacgtcatacattgacggggatgaaggtcctagcggttcaatcggctgagaatccatcgtttgcggccatctattccgttaataaaagtgtgcgtcaagggacactggtcaagatgattcaagaagcctttgatttgtatcaagacgttattcccgaattgatcccagaggatattcgcacgcgctataagttaatgaacgaacgcgacttaattgctggcatgcatttccctaaaacgtatcctgaagcaaagcaagcacgccgaagcgctatttttcatgagttcttcctatatcagattcaattacaagccattaaacagactgatcggcatgtggcaaacggtttagctttgcagtaccaaaatgaagcacttaaagattttattcaaaccttaccgtttgatttaaccgatgcacaaaagcgagtggtgaatgaaatttgtcttgatttaaaatcaccagcgcatatgaatcgccttctccaaggggatgttggttctgggaaaacgattgtggcggcgattgcgctgttcgcggcagtgactgcgggttatcaagccgcattgatggtgccaacggaaattctggcggaacaacactatcaaagcttgcaacgcttattggcaccaatgaacgtgactgttggcttattgaccggttcgacgacggctaaagaacggcggacgttgttggcagacattgaatccgggcgcatcaatattattattggcacccatgccttgattcaagatgcagtggtctatcataagttaggctttgctgtaattgatgaacaacatcgtttcggggtcaaccaacggcgaattttgcgtgaaaaggggttacagcctgatattcttgcaatgacggcgaccccgattccgcggacgctggcgattaccgcgtatggcgagatggacgtttcaacgattgatgaattgccaaaaggacggattccaattgaaaccagttgggtgcgtagtaatcaagtcgaacaagccctcagctttgtccgtaaacaacttgcaaacgattcgcaagtctttgcgattacaccgttgattgccgaatctgaacagatggatttaaagaatgccgaggagatttacgcaacgttggtggaacaatttgaacctgattaccatgttgcattgttgcatggccagttaaaagatgatgaaaaaaatcagattatgaacgctttttctgagaacaaaattcaattactggtttcaacaaccgtcgttgaagttggtgtcgatgtgccaaacgcgacggtgatgctcatttttgatgcggatcggttcgggttggcgcaattacatcaattacggggccgggttggccgaggtaagaaaaaggcatactgtattctggtggctgatccgaagaaccaacaaggtgttgaccggatgacgattatgactgaaaccactgatggattcgtcgttgcgcagaaggatttagaattgcgcgggccaggggaagtctttggtgatcgtcaatctggattgcccgtctttaaagttggcgatccagtagccaactttgcgagtttacaagtcgcccaacaagaagtgcaaaaaatcttcacgcttgatcctgagttggcagcaccgaaccatacgccactcaaaacatacttacaacaacaaaagcaaaattacctaacgttagattgaaaacggaaagaggaatgatgatgaaaattgcagtagacgcaatgggcggcgattttgcaccccaatcagtaattgaaggtgtgttacaagcccgctcagaattaacagatgttgaatttacgttgtatggtgatgaagcacaaattaaaccgttgattgatgatatgacgcggttaacgattgtgcataccaccgaaaaaatcaccagcgaagatgaaccagtgcgtgcgattcggcgtaaaaagcaagcttcaatggttctggcggcgcaggcagttaaagatggggaagcagacgcactcttttcactagggaatactggtgcgctcttagcagccggattattcgtgattggtcggattaaagggattgatcgtccaggtttaatgcctaccctaccagccattaattcagatttaggcttcaatatgttagatgttggggccaacgccgaagcaaagccggagcatttgcatcaatatggattaatggggaacttctacgcacaagacgtccgtggcattcaaaagccgcgaattggtttgttgaataatgggactgaagctggcaagggtgatgagttgcataaggcagcacatcaactactggcagatgatctaacgttaaacttcattggtaacgttgaagcaagtgaactcttaaaaggggttgcggatgtcgtggtcacagatgggtttaccggcaatgcgacgcttaaagcaattgaagggactgccacaatcgtgatgtcgcaagtcaaacatgcgattatagatgctggtgtcaaagaaaaaatcggtggtttactcttgaaaaagagtgttggtgggattcgtgataaattcgacacatctgtttatggcggggctgttttattaggcttaaaagcccctgttgttaaggcgcacggtgctgcagatggccgcacggtttactacactgttcgccagattcatgcaatgctggcgaaccaaacgattcaaaaagtaatcgattattttgaccaacaaaatagcccaaaagaaaccgattaaaataggtggacaatgtgttccaaaggcgctacaatatacttcgcaagtctgatttgatttacttgaattgagttgcgaagttatgtataatcactggatacccaaagtgttaagtacgtaggtaagggtttcaatttggaggtttttaattatgaatgaacaagaaatctttgataagattgcggctattattggcgatcgatttgagttaaataaggatcaggtaacagacgaattgaacttcaaggaagacttggatgctgattcaattgatattgtggaatttgttttggaattagaagacacttttggtgccgaaattccggatgaagaagctgaaaagatcggtacggtagctgatgccgttgcttacattaaaacaaaaatcaaataataaccttgaaaacgagcctgttggttgtgagtattcgcgaccgacaggcttattttttgcattttaaacagtttgtgaaaatgagattattcacataataatcatttgcggatgcgttataatattagaatgattcttataatggctctgcatcaatgaaaataaattagaatattttaatctttattatttacttttcatttttaatcatgtattattatttttaataactgaagggagtgtccatatgaaacgagaaaagagtttggtattaggtataacaacagtggcggtcacattattattagcagcttgtggtaactcaggtagcaaggaagccgttaagactgacacagccagttttgcaactggggatgtcattgcgacaatggattcagcgttaaatacggatgtgatcggtgcgcaggctttaaccgatacgatggaaggcctttaccgctacgagggtaaagaaatcaaaccggcgattgcgactaaagtggtcaaaccaactaataacggtttaacatatacattcccattaagaaaagacgcgaagtggagcaatggtcaaccggtcacggcagaagatttcgtttatgcttggcgcagagtcgttgatccaaaggtcggttcacaatatgcttatatctatgaaggcattaaaaatgcagcagacatcacgactggtaaggaaccggttaattcattgggtgtagtcgctaaggataaacacaccttagaagtcacccttgaaaaaccaattccatacttcagtcaattgatgaccagttcaacattcttcccccaatatccagaagcggtcaagaaagctggcaagagttacgggacaaattctaaaacattagttttcaacggcccttataaattagaaaattggaatggcccagatagctcatggaaagaagttaaaaacaccaattactggaatacgaaagcagttaaggttaagacgttgaagtatcaagtggttaaagatccatcaacagctttaaacctcttccaaagtaataaattagatcggacggcgatcagtggtgacacagctaaacaaatgaaaaacgatccacattactcaaccttacaaaaatcagcaacattctacatgcaagtcaaccaagaaaagaatccaatctttaaaaatgcgaagattcgccgagcaatttcaatgacaattaatcgtaaagaattagtcgcacaggttctaggtgatggttcaagtccaattgcttctgtgacaccaaagaatatgtcatttgacccaacaactaagaaggattttgttgatgatttagacgcagcgggtaagaaaaatgcaagttacaaccctaaagaagcaacaaaactttggaacgaaggccttgctgaaactgggcaaacaggcaaaacattcaattacacattacttggcgatgatacggatactgccaagaaacaatccgaatatttgcaaaatactttacaaaagaacttaccaggtttgaaagtcacattagcgaacgtgccatttaagactcgtttaacacgttcaacgaacggtgatttcgacatggtggttagtgcttggaacgctgatttcccagatccaatcacattcttagacttgtttgtaacaggcggcgataacaatgatggccattggagcaatgccgaatacgatgcacagatcaaggcaagtaaaggtgacaacgccaatgatcctaaagcaagatggcaaaaccttgttaaagcacaagatattatgaatacagagtcaggtgtcattccactgtatcaatcaggtgtggcgtacttaactaacccaagccttaaaggtttagactacggcccttcaggaaactacaataatgtctcactttatttagaaaaataaactgactttataaagatgggtttcggcgttgaaaaacaatgaagcccgtttttgttaggagcgaacttatgagtaaataccttattaaacgaatattctatttagtgctaaccctattcattgtcgcttctgtgaccttcttcatgatgaagttgatgccagggacgccatatacgaatcaggaaaaaatgagtgctgatcaattacggatcatgaatgaacagtacggtttgaacaaaccattgatccagcaatatttcatctatctaggtggtttgttgcatggtgattttggcacatccttccagttcaacaatcagcccgtcttgagcttaatcatgacgcgtttaggaccttcattacaaatcggggcacaagcgatgattgtcggctcattactgggcattttactaggggcagtggcggccattcgcaagaacacatgggtcgatggcgttgcaacgttcttttcaatcgttgggatttcaattccgaactttgtgttggcggtcttactccaatttttccttgcctttaaattacaactattcccaattgcgttatgggacggctggtcatctagtgtcttaccaacattagcactagcggttgcaccattggcgaatacggctcggttcatgcggactgaaatggtcgatgttttaaacagtgattacatcgaacttgctaaagccaaaggcaattcaaaatggcaaacagtggcaaagcatgccttacgaaattcaatgattccggttgttacgattatcgggccgatggcagtcaacttgatgactgggtcactagttgttgaaaatattttctcgattcccggaattggggagcaatttgtgaagtcaattatgacgaatgattatccaacgatcatgggcttgaccattttctattcattcttattaacagtgattattctagtcgtcgatattctttacgggattattgatccacgaattcgattaagtgacagtcagggggcgcactaaatggcagatattaaaataccagcgggctcattcaagccccttacacaagacacgcatgaagcacaagaaaaaattagtgcaccatcattgacgtttacgcaagatgccattcggcgcttaaagcaaaataaagtcgcggtggtttcgttagttgtcctcttaattgtgatgttggctgctttattggcaccagtgattgcaccacaaagtccaaatacacaaaatgtggcgtacgctaacttaccgcctaaaattggatcggggaatatccctggttttaccggtaagatggacgtttccggtgttaaagttgataaatatcaacaagcgggcgttcccaaaggcaaaacgtttatcttagggacggattatctcggtcgtgatttattatcacgaattttatacgggacacgcttatccttattaattgggattctagcgacattggtcgatttattaatcgggattccatacgggattgtttccggatggcgtggtggtcgtttggatatgttcatgcagcgggtaactgaaatcatttcatcaattccaaacttaattgtggttgtcttgatgatgttggtactccgtccaggtttattgtcaatcgtcatcgcgattggctttaccggttggattacaatggcccggttgattcgggcccaaacgttccaacttaaggaacaagaattcgtgctcgccgcacggacgttgggtgaaagttccaccaagattgcttggaaacacctgattccgaatttatcctcaacgattattattcaaacgatgtttacaattccgagtgcgattttcttcgaagcgttcttgagctttatcgggattgggattccagcaccgaatgcttcattagggacgttattatcagatgggcaaaaagctttccgtttcttgccatatcaaatgtggtatccagcagcagtcctctgtgtgatcatgattgccgtcaacttactagcagacggactaagagacgcattcgatccaaaatcatagcgtgtgcaagtaggcggttagctttcgcggattagcatagtctgacgaataatcaacttgttgattatttattagacgtagctaaccacagaaagcagttaatgaaagcacgtttagaagcagagtcagtttcaaaaagcatgtcaatacaaggccgtttccacgcggtttcatcattggaggtcgtcaaatggcaaatattttagaagttaaacatttaagtatcgattttaaaacctacgcaggggacgtccatgctattcgcgatgtcagtttcaacttgaaaaaaggcgaaacactagcgattgttggtgaatcaggttcaggtaagtcggtaacggtccgtagtattatgggcttgttagcgggtaatgctcaaattaagggtggtacaatcaagtatcacaatgaagatctcttacaaaaaccagaacaggaaatgaatgccttacgtggtagcgatatttccatgattttccaagatccgatgacgtcattggatccaacgatgccgattggtaaacaagttgctgaacccttgttgattcataaaacaatgaataaggaagaagcaatgaaacgtgcacagagtgttttagagttggtgggtattccgaatgccaaagcacggatgaaagattatccgcatcaattttctggtgggcaacggcaacgaatcgtgattgcgattgcgattgttgattatccacaaatcctgattgccgacgaaccgacaacggcgcttgatgtgacagtgcaagcacaaattatcgatttgatgaaggaattgcaacgcaagattgaaacctcaattattttcattacgcatgatttaggtgttgtggcagggattgccgatcgcgtagcggtaatgtatgccggtaagattatcgaatatgggttggttgatgaaattttttatcaacccaagcatccatatacgtggggcttattgaactcaatgccaacacttgatacttctggccgtcttgaagccattccagggaccccaccagacttgttggatccaccaaaaggggatgccttcgcaccgcgtaatccatatgctttacaaattgatgtggaacaggaaccgccatttttccaagtgtcgaaaacgcattttgcggcaacttggttgttgcatccagatgcaccagctgtggaaccaccagcagccgtccgtgcaatgatggctaagtaccaggcgacacaagttcaagagaaagtagggacaattgatggacaaggataaaaaagtattagtgtcggttaaacatttaaagcaatattttagccaaggaaaaaaatccgaagtcaaagccattgatgatgtctcatttgaaatctatgaaggcgaaacgtttggcttggtgggtgaatctggttctgggaagagtacaactgggcggagtatcatccggctatacaacccgacagatggtgaaattctattcgatggccgtgacattagtaagattaaaaatcatagtcgtgaaatgaaggcgttccggaaagagattcagatgattttccaagatccctacgcatcattgaatccacggatgaaagtcaaagatatcatcgctgagggcttgcatatccatcatttggttaaaaatgatgcagaatgtgatgcacgcgtcaacgagcttttggaattagttggtttgaataaagaccatgcaacgcgttatccatatgaattctccggtgggcaacgccaacgtattgggattgcccgcgcgcttgcggtaaaacctaaatttatcattgcggatgaaccgatttcggcgcttgacgtatcgattcaagcacaagtggttaacttgatgaaagaaattcaagaacagcaaaacttgacgtatttattcatcgcacatgatttatcgatggtgaaatacattagtgatcggattgcggtgatgcataacggtaaaattatggaattggcatcagccgatgacatttatgatcgaccattgcatccatatacgcaaagtctattgtctgctgtgccgttacctgatccaaaggtcgagcggcaacgtcggcgaattgcttatgatagttcaattgaggcagataatgaaggtcgtcaattgcgcgaagtggccgatgaacactatgtctatgcaactgaagctgaactagcgagttatcaaaccgctttagcagcaatgacaacgccatctgcataaagcaacgcctgttttgaaatattcgtttgcgtgttacaatgaatacttcaaaacaggcgttttttagtgattaataaaagaaacggtttgctaggaacgacgctgtttttttaagcgtataaacggtataatagtgaaagattaaacagttgaaatggggtaatttaattttggatgcagcactagtgagcgagcttcgagcccgctacggcattgaatttcagaatttagcactattggacgaagcctttacacattcgtcatacgtcaatgaacaccgggagttgggtcttcgtgataacgaacggctcgaattcttgggtgacgcggtgatggaaattacggtttcggaatacttatataaaaaatatccggactggccagaaggcaaactgacacgcttacgggcggcaatcgtctgcacgaagagtttcagtagttttgccaaagaagcgcactttgatcgatacattcgccttggtaaaggggaagaaaaaaacggtgcgcgggcacgagcaacacttttggaagatttatttgaagcttttaacggcgctttgttcttagatcaagggcgtggcgcagttgttaaattcatcgaacaagttgtctttcccaagattgaagccggtgaattttcagaccaaacggattataagaccaatctgcaagagttattgcaacaagatggtgaagttgagattgaatataagttattggcagaagtgggaccatcacatgcccgtcaatttgaagtggatgtgatgatgggcgatcgcgtcttaggttcaggtgttggccggaacaaaaaagcagccgaacaagcagctgctaaagtggcgcttgccaaactgaaataaagaaagaagcaaacgacagttgaaaccaaccgccgtgtgtagggagtttagtgcatgcagttaaagtcattggttttatcagggtttaaatcatttgctgataaaacagaaatcaatttttcagaaggtttaacgggcatcgttggaccaaacgggagcggtaaaagtaacgtcacagaagcaattcggtgggcgatgggcgaacaatcagccaagagcttacggggcgaaaagatgcccgacatcatttttgccgggactgatattcgaccacagatgaataaggcagaagtgacgctggcttttgataacagcgatcaatatttgaaacaagaacaagccaacgtcacgattacgcggcgtttatttagaaatggcgatagtgagttttatttgaatcaaaagagttgtcggttaaaagacatcgttaatttatttatggattctggccttgggcgagaatctttttcgattatttcgcaaggtcgggttgaagcaattttcaacagtaaaccagaagatcggcggaatattattgaagaagcggccggtgttttgaaatataaacaacaaaagaaaaaggctcaatctgaattagatcaaacagatgaaaatttgagtcgggtcaccgacattctccatgaactacggggacaagttgaaccgttgaaggaacagagcagtattgcgcaggattacttggatcaaaaagcgcaatatgatgcgttgcaccaacaattattggtgattgaaattgatcaattagtggctgaccaaaagacgtacaaagaaaaggcgcaaacccttgcgcaagcgttgcaagagattgaagcggacatcgttaagacgacggctgcccaaaccgagaatcaggcaaccttagcccagttggaacaacaaatagaacaagataatcagacgttgttagaaaagtctcgcttggccgaaaatctattaggccaagagaacgtttcaaaagagcgcgctaattatacggatgcgaaccgccaaagtttagtcgaacagatcgacacattaaaacagcaattaacggcggaacaagccaatcaatctgaattaaaggcaagttatgaagaaaaggtgacggcattaagggcgttgaagacggagttaaccacccttaaacgccaagcgtctggtagtgaagcggaactgaaagcgaagattgaacaaattcgtcaagaatacatcgatcagatgcaagcccaaacgaccaatcataatgaacaacaatatttagaaaagaacttgttacaaactaaaacgcaacttgcacggcaagatagtgcagtcgatgagacatcgacgcaattggcacaaaaaaaggcagaacaagcggcccaaaaagcccaacttgaaacactcaaagcgcaatacgaaacgttgtccaatgagttggccgaattacaaacgcaaattaacacggaccaagcggcttaccaaaatcaacaaaatagttggttccaagcgtctggtattttacaaaaagcgaaagcaaaacaagccagtcttgcggaattaaatgatgactacgccggcttttatcaaggggttaaggctgtcttgaagcaaaaacaacagttccctggtttattaggggctgtagcggaattgatgcaagtgcccagtgagtatcaacaagcgattgaattagcattaggcgcacagctacaacaagttgtgacacgggatgaacagacggccaaacaagcgattgagtatttgaaaaccaatcggattgggcgggcaactttcttacccaataacgttgtcaaaccacgtttactaccaagtagcttagttcaccaattacaacagcagcctggatttatcggaattgccagtgagcttgtgcagtttgatgaacaagtgcgaccggtgatgaaccatttgatgggcaatttgattgtcgcgactgagttggagccggcgattaaattgagtcaattgacggggcatcgttaccgaatcattacgttagcaggggatattttaagcccgggtggttcgatgactgggggccataataaccgacaaaacaatggtgggctacttgcgcgtaagcaaaccttgactgatttagaaggtcaaattgccaagatgcaggtcgctttggatcaaaagcaagccagtgtccaagccgcaaaagctcaattaacggcacgccaagcagaattaaatacgaaacaagcggcattggaaaccgctaagaatcaatatcaagctgcccaaaatacgttagccttgactgacgaacgtttgagtcagtttgaacggcaacaacaagcaaccgattatcaagtgcaacaacaacaacaagcttatgaggcagatttaaaacgccaggcagaattagtggcagccgaagctgaaattgttgcgtcgattgcacagctgcaagcagatctcgaaacagctaatgagcaattacaacattttgatgagagtcaaaaacaaattgcgcaacaacaaacagccctcgaaaccaagttggctgtcgctcaagctgaacaaaagaatgttcaggagaaattaacggttgctactcgcaatagcaacgacctggcagcccagttgaaggccagtcaggataaactagctgcgctaaaacaagcggatcaagaagacgcttcgagtcaaaaagaacgacgagcactgctaaaggcaaccaatgctttgattgagaaagtccaagcgaagttagccactgaacgcgcgcaaaaagaaacgctgaaggcggaacaacaaacgcttcaagccaaggccacacgcgtctaccaattacaaaaaaatagtttagctgagcaagaacaaaatgctgtcgggctcaaccgggttaaaattaacattgatcaacgcttaaatacattgagcgaagattaccaattgacttacgaagccgccaaggccgctttggccgcatcagacttaaccgacgatcaattgcggtctaagttgaaattattgaaactcggcttagctgatttaggaacggtcaacttggcggccattgatgattatcaacgcgttaaagaacgttacgatttcttgatgcaacaagatgccgacttgatggacgctaagcgccaattattagcatcgatggctgaaatggatacggaagttgaaaagcggtttaaggaaacgtttgaacaaactgccgctgcttttgaaaccatcttcccgatcatgtttggtggcggccatgccagcttaacgtttacggatccaagcgcactattaacgagtgggattgacattattgcgcaaccacctggtaagaaactacaacgcttgagtcttttatctggtggtgaacgcgcattgacggcgattacgttattgtttgccatcttaaaagtacgcccagtgccgttttgtattttggacgaagtcgaagcttcgttggacgaagccaacgttgatcgtttcggtcgtttcatgaaacgttatgagagtgatacacaattcatcgtgattacccacagaaaagggacgatgacccaagccaatcgcttatacggggtgacaatggcggaatctggaatctcgaagattgtttccgtttcattagaaaaacacgcaacagcctaggaggaaaaccatgggattatttgatcgtattaaaaaagcattctcagccgaaccagaaaaagaaacaccggttgaacaagaccaagcgataccggaaacaccggttgaatcagacgctacgccggttgaatcgcaaacccctgcagaaactgcggcagctgagaaaactgaaaccgatgaaccagccagtttagcaactgaagatgattcagaaacggtatcaccgcttgacacaccaacggcggcacccgtaaactcagaaccagaaccagaaccagaaccagaaccagaaccagaaccagaaccagttgaagcgtcggcagtaactgaagaatccgatgcgattgaagaagtgccggaaacagaagcagtaactggcgacatgcaagctgctgaaacgaagaagtatgatgatggattagaaaaatcccggctcacatttgggcaacgcttaaatgcgttgttcgctaactttagaagtgttgatgaagcctttttcgatgatgttgaagaaatgttaattgaagccgatgttggctacgaaacagcgatgaagattgctgacgaattacgtgacgaagtgaagttgcgtaacgttaagaaaccagaagcggtttcacaagcgattgttgaaaagttagttgatttgtacggtcaagaaagccaagcagaagataatcaattgcatttcgctccacaaggcgaattaactgtcttcttattcgttggtgtcaatggtgcagggaaaacaacctcaatcgggaagtttgcccaccaattagaaaaagcgggtaagaaggtcttattagcggctggtgatacctttagagcgggcgccatcgaacaattacaagaatggggtcgccgggataatgtccccgtggttgctagtgcagcagggagtgatccagcgtcagttgtctatgacgcggttaagcgcgctaaagaagaacaattcgatattttattagttgatacggccggtcgtttgcaaaacaacgtcaacttgatgaaggaattggaaaaagtgaaacgcatcatcacgcgtgaagtaccagctgcaccgcaagaagtattgttggtcttagatgcaacaaccggacaaaatgctttagtccaagctaaacaattcaagcaaacgaccgatgtgactgggattatcttaaccaagctagatggttcggccaagggtgggattgtgttagccgttcgcacagaattacacttaccagtgaagatggttggtctaggtgaacaaatgaacgacttacaactctttgatccaaaccgctttgtttatggcttattcaaggatattattgtcggtgatgggccacaaaaaacaactgatacagacgtcagtcaagcgattaaatagcaaaaaggctaggacaaataatttgttctagcctttttttagaagaaagagagattaacagatgaaaattgtgttagcaccagattcatttaaaaatgctgttaccgcaaaagaagcggctcgtgcaatgcggaaaggattcgaaaaaagcctaccaagcgcgtcctatgtcgaagtgccaatggcagatggcggcgaagggactgtccaagcgcttgtcgatgcgaccaatggccggttcttaaccgcacaagtgcaaaatccattggaccaaacggtatcagcacaatatggcatcttgggtgatggcaaaacggcggtgatcgagatggcagctgctagcgggattcagtatgttgatgcgcaaacgcaaaatccgttgataacaacgacttatggcaccggtcagttaatggcagccgcactagcacaaggtgtgcaaacaactgtgattggtttgggcggcagtgcgaccaatgatggcggtgctggaatggcacaagcacttggggtgcgtttgttagatgttgacggacaggtgttaccactgggcggtggggcgcttgcgcgtttagcacggatagatacgacgcatatgataccggcactatcaagggttaaggttgtgattgcatcagatgtcacaaatccgcttttcggcccgaatggcgcatcagccgtgtttggtccacaaaaaggagcaaccccagcaatggtcgcgcaacttgatcggaatttaacgcactttgctgcggtgattgaacgtgatttagggaaatctgttgcgcaaataccaggtgcgggtgctgctggtggcttaggggctggtttattggcgtttacggatgcgcaggttcaacctggtgttgagatggtcgtggcgcaaactgggttaactgagattgtccgagatgcggatatcgtcgtcactggggagggcggaatcgattttcagacacaatatggtaagacgccaattggagtcgccaaagcggttaaacaagttaatccacaggcgacggtgattgcgattgccggatatattggagcggggattgatgtgctttatgaattaggaattgacagtattttctgcacaacacctggcgcaatgtcattagcaaaagcaattgaagctactgaagttaatttaacgcaagtcagtgaaaatatcgcgcgattaatcgctaaacaacattagaaaagaggaccgacaaacgtgtcgatcctcttttttagcattaagctgttttggcttttggttcgcgtcccaaaatcacttgggcgataattaagacgacataggcgattaaaacgccacctagtagactgttggttgcggttgctttaaccaaccagtattcttgccaagcgtgattgttgaagacccaccagaataatagcccgaataataaggttaagatgtttaaaatggcgaagaaccaaagattaccattttccttgttctttaaatagacgactgagaagattaagttccaaatcccccaaccgattaatgcgaatataacgccccaatagataattgttgctgccatcatacaacctccatagaaattccaatttaagttatgaaaaagcttacagttctattttagcatgatttttcgtttataccagtgaaaagataattaatgcacaaacttctagttaaatcgcgcaataaaacgttgactaagcccgttaaaatcggtactctaatacttaggtcaaactaagtctaggaggcgtcaaatggaactcgcacaaaacgcacgcatgaattcgttgttcgaattttatggcgcacttttaacggcaaaacaacatagttatatctctttatattatggggatgatttttccctcggtgaaattgctgctgaatacaatgttagtcggcaagcggtctatgacaacattcgccggactgaaaaaatcttagagggttacgaagaaaagctacatctttaccgtaattatgaacagcaaaatgccagtgcagatacgctacaaaagtatattcaagcgcactatccagacgatcaagaactgatgcgcttgttggctgacttactgaatttaaccgaacaataattaacttaaaggactgataaaaaatggcatttgaagggctaacagaacgactacaaggcgcattgagtaagcttcggcgtaaagggaagattaccgaaacagacgtcaatcaagcgatgcgcgaaattcggctggcattattagaagccgacgttaactttaaagtggttaaagactttattaaagtcgtcaaggaacgcgccatcggggcagaagtccttgatagcttatcacctgcacaacaaattgtaaaaatcgttgatgaagaattaacgaagatgatgggtgaaacggctgtgccgttgaataaatcaccacatattccaacaatcattatgatggttgggttacaaggggccgggaaaacaaccacggccgggaaattagcaaaatatttaatccaaaacgaaaaagcacggccattgatgattgccgccgatgtttatcggccagctgcgattgaacaattgaagaccgtcggcaagcaagttgacgcacaagtctttgaaatggggacggatgtcaacccagttgaaatcgtccgtcaagggttagcacaagcggccttacaaaagaacgattacgtcttaattgatacggctggtcgtttacaaattgacgaagccttgatgcaagaattggctgatattaatgagctagcccatccaaatgaaatcctcttaacggtcgatgccatgactgggcaagccgctgtcgatgttgctgaaggctttaacagtcgtttagatgtcaccggggtcgttctaaccaagttagatggcgacacacgtggtggggcagccctctcaattcgtgcagtcaccggcaaaccaattaagttcactggtcaaggtgaaaaacttgatcaactcgacattttctatccagatcggatgagtagccgaatccttgggatgggtgacatgttgagcttgattgaaaaagcgcaacaagattatgacgagcaaaaagcagctgatatggctgaaaagatcaaagaaaatagctttgattttaacgatttcttggatcagatggatcaattgcagagcatgggacctttggaagatatcatgaagatgattccagggatggccaataacccacaactcaagaacatcaagatggatccgaaagacatggcgcatatgaaggccatcgttcaatcaatgacgccacaagaacgggaaaatcctgacttattgaatcctagtcgccgtcgtcgtttagcggctggtgctggtcgcccaatcgttgaagttaaccggatgatcaaacaattcaatcaatcgaaaaagatgatgaaccaaatgtcaaagggcaactttaacggcatggaaggtttaatgggcaacggtatcaagggtaaaatgggtaagatggccatgaattcaatgatgaaaaaacaaaagaaaaacaagaagaaacgtctcaagaacgcgcgtcgttttaaatcttaaaaaaatttgtcctgtaaagaaaaaacactttacacggcgtttgaaatttggtatattatgacatgttaaagaattaataggaggtggcattaatgtcagttaaaattcgtatgaaacgtatgggttcaaagaaacgcccattctaccgtatcgttgttgcagattcacgttcaccacgtgatggtcgctttatccaacaagtaggttactacaatccattaacagaaccagttgacttgaagttagaagaagaagttatcatggattggttacaaaaaggcgcacaaccttctgatactgttcgtaatcttttatcaaaacaagggattatgcaaaaatatcacgaagcacgcttcgctaaaaagtagggattcgttatgacagacgtgaaggaactaattattgcaattgttcagccacttgtcgaacatccggaagacgtcaaattgactgaacatgagacagaacgttttatggaatttgacttacaggttaatccaagtgatatcggtcgcgtcattggcaagcagggacgggttgcacagtccatccgtaccattgtctatagtgtgaaagcaccataccaaaaacgggtccgtttaaatattgtagatgcctaacaaaaacgtttaaatgaagcagagatgttttatttaggcgttttttgtcgattaaggagaaattaaatgccagaaaaatactatcaagttggtaaaattgtcaatacccacggcatccgtggtgaagtgcgggtcattgcgacgactgactttacggattcacgatttaaaaaaggcgtgcaactggccgtcgaaatgcccaatggccttgttgatgttaaagtggcggcaatgcgccaacacaagcaattctatctattacagttcgaaggaatgggcaatatcaacgatgttgaacagttcaagggccataatttaaagattgctgcaagtcaacgcgaagatgatctggaagatgatgagttttactacggtgatattatcggcttagaagtggttgaagaagccgatgggaccagctatgggaaagtctcagaaatcatcgatccaggtcccaatgatgtctgggtgatcaagcgccgcggccgttcagacttactcttaccatttttgaagtcagtcgttaagaaaattgatattgaagcgggtaaagcctacgttgaagtaccagaaggattgattgataatgaagattgatgtcttaagtttatttccagatatggttcaaaatgggttatcccaatcaattatcggtaaggcaattgatcgtgacttaattgatttagaagtgacggatttccgtgatttttcagtcaataaacacaattcggttgatgatgcgccgtatggtggaggtgcggggatgttgctccgaccacaaccgatttttgaggcgatggatcaagtgaatgccaagaatccggggcacaaacgggttattttgctcgatccagctggggtaacgtttaaccaaaaagttgccgaagaatttgctcaagaagaccacttggtttttatctgtgggcattacgagggctatgatgaacggattcgcacgctagtcactgatgaagtctcattgggcgatttcgtcgtcactggaggcgaattgggcgcaatggtgatgattgatgccatttcgcggcttgtacctggcgtcttggggaatgaacaatcagcggttacggattctttttcgaccggcttattggaacatccacaatatacgcgaccaccagaataccgcggtttaaaggtacctgaagtcttgatgaacgggaatcataagctcattaacgagtggcgcgagaagatgtccttgaaacggacatatgaacggcgtccagacttactagcgaagatgacgttgaccaaggatcagttgcactggttacaagaaattaagcaagaagcggctgaaaaataaggcttttattctcagttgaattatgctaaaattaaaaattgtgatgattagtcacaaaacaacggtattccgctggcgcaagacgttaatgaatatctgtggaaaaaggagagattcaaaatgaatccattaattcaagaaattactaagtctcaattacgttcagatattcctgacttccgtcctggggacaacgtacgtgttcacgtgcgtgttgtcgaaggtactcgcgaacgtatccaattattcgaaggtgttgttatcaaacgtcatggtgttggcgtgagtgaaacttacacagttcgtaaaatcagtagcggtgtgggtgtggaaagaactttcccattacactcaccacgtgttgctcaaatcgaagttactcgtcatggccgtgtacgtcgtgctaagttatactacttacgcgcattacgtggtaaggcagctcgtatcaaagaagctcgtcgttaagatgacattaaaaaaggccgactcattacgagttggtctttctttatgtggattacaaagttaggtgatgacagatgaatcaatggatctacgttgttttatatcaagcaaacccactttattatgataaaagtaaaatgatccgggcgtttagttcggaacaacgggcccaagaatatgtggcgttgctcaatgagacgccatatgcgaatcaatcactaaaagagggccattatacttatcaaaagttgaacttaaactaatctaataaatgccacttataaggcgcaatctgatgcttctgcggagtatgggattgtgcctttttgggttgtggcactttcttgagggtcattaggagtgcaagtagtggttctaataatagaataaagacggtaaatccaagaaatccagctacggcgtagaatgcttcaggcgcaagtgtgagttgattaaagaaccgttcgcagcggtggttgaaggcgtttaatttttgttcactgccatcacgatcgactgcgtggtggacctttggatgccgacaaacttcaaagcggattggatttttttgatgattactagaaaagcgcatgcctttgccgaagaagtaagggcttacaaaaggcagtaaacaaagtaccaataaagatagaatcgcagttagtcgtttcattactagaacctcttttgtcttaatttcaaactaattataccataaattaaatgggttagcgcataaaaaaatagccctccgacgaggactaagcaggtgttcgataatggaaatgatagactttaaatgaaatgatcaagctaaccactaacaagaaaagggcaactagtaataaattagggactaaaatcaagatgatgtaagcgacgattgcacataagtatgccagtaaaatcaaattctgatcgagtgataataaataagcaacaatatgcaaaataatagcaataatgcacaaccaccatactttcgccatggcatccatataagtggggatgaatttcgtaacgtgggggttaaccactagaatgatcaaagattgtaaaaccgttacaactaagaaaattaagttgaataaaaacggtagtttgcgataagaaatcttcatattaataaacctctatcatttaagattctttaagtataacgaatttttttataaaaagaaatatgattcaataaatttaataattggtcaattaacggggaaaattgcgttattagcttcggattgatacaatcaggttaatttaaaacgagtaggtgatttgatgaatagtatccatttaatttgtttaggtgttcaggatttaaccgtgtcacgtcagttttaccaagcactcggctttcaagcgccgaatttagaaaatgctgagacaatcgtctttttcaataatactgggaccaagttggaattgtttccgtacactgcactactagccgatattggcttatccgcagataatcatccatttccaagaacgttcaacggcgtgatccatgcctttaatacgcatagtcaagcggaagtcgatgcaacatttaaaacagctctcgctaacggggccacgctcatcaaagcgccagaatggggcgagtggggtggctatagtggttatttcagtgatcccgatggttactattgggaagtcgcttactcaaaggactggcaatttgatcaagatgggatggtggtgatcgaatagaatgtgggcgcacgtagatttttttgcgttttacgctgttcagttctttagaagtctgttataatgaataacgttctggagagttggcagagtggtaatgcaacggactcgaaatccgtcgaaccggcttataccggcgcgcaggttcaaatcctgtactctccttacttgaatatcttatactttccgatattagcctaattgctgttaaatcagtgattaggctattttcttattctcttgaatttactatatttgcctatatttgctatcaaaggttagtcaaaaaggttagtcaattttgatttgaggtgtgctagaaatggtgtttttaagttaattttcgctaatccttacagccccaacggataagctgccttttttgactaactttttgactaaccctcaataatcgacgtctaacgcagactttagtttgtccttttggtttgatgtgacatgagtataaatgtccattgtcacactaatattcttgtggcctaagcgctcttgaaccgctttaggtgtaatcgtattatctttctcaaacagcgatgtggcgtgcgtatggcgtaaaccatgcggggtaatacgatgcacaaacgttttatagtagtcatcaccagtcagttggaaagtggttttaaacgtttcggcaccttgatctataatgctgtctaaccagttgttaggcttgccaaggttcaaccaggtgtctttttcacttgggaagacgagattagagtgactaaattctttatattcttgcaacgtattagctacaaggttgttaatgtctattgtgcgataagacagccatttaggtggctgggttgccaacttgccaaactcattcatggctaaggttttatttacatcaagcttattgttctctaaatcaacgtcagaccattcaagtgacaacagttcacctttacgcaaccccgtgtaagccatcgtgatgaagtacacggcgtgcatcatggtcaccgtgccattagcacgacctttgaccagaaagcgagtaaacttgtctaactcgtcagcgctaaagaagtttgtgctgggcgtcttgtttgtgttattgacttgtcgttctggtaataatacgtgattaaacggattgcttttaatcagtttgatcgtgtaggcatacttaaatactcgattagcatagcggcttacgatgtttaacttagcgtacttggttgcccaacggtttacgattggctgcaagacttccggcgtaatatcatccatgttcattgcgccaatctccggcagaatatgacaatcaaagatttgtttggttttatagaccgtacttgattgaaccgtcttgcgatacgattcagtaaaccaccgctggtaaacatcgttgaatgtgaggccgtcggattcaagtggggtgttaaactcgtacttgttattcatcacttgggcttcgattttacgatatgccgcattagccaaggcaggtgttttgaagccacggcgggtagttgtcgttttcttgttagtcgctggattaatgcccgtatagatttggaacatatactttttgacgcctttttttgtttcgtattccttgattgctgggttctttttgtattcaagcattaaaatcactcctattttatggtaaaataggtacacaaaaagcgttacgcttatgcgtaccttttggtcagacacacccaattactttggtcggtagggggtgtgtcttttttattccgacaatcttataattacatagttttttacaatctttacgctcgaatgagatggaaaagctctcattttcggaatatacttttgtaaatttttatattcttttgcgttgacaggatttaattccaacccttggtcgttaagaaaatcggtagctcgattacttacgcccacctcgccaatagtatcccattcaaacaacgatttacccaaaacatcgccttttataatgtttttcgaactaaatccctttgcaccgtagaatgcgaatttataatctttagtgttgtttatacctaaatcggcaaatctattctgtaaatcctgtttgaattcgagctctgcctgaaattgattgtactcgctgacaccgaaatcgttcgttatcttagcttgaactaataggcaagataataacactattccgacaatggggataatgaatttagaaaaacttagtttggaaattaaatctacaacgataatagttagcagcaatagcagtaaaggataagtaggtgcatagcttctgattggaccgattgaaccggtagttaacatagggaggacggctgctaaccccgcaagaataatggttgttagcgcaattgctattttatttatatttcttttgctgaaaataagtaagcagcatataatcgataagatgaataacagagtagatagcacgaagaagaagtaatttacttgtaaaaaatactgtttaaacgctagtacaacatcagcgatccaggttttgatggaaactttgccaataatatacatattgcttagatcagggactactggatattaatgtgactgatttggtcccctgtcaataaaatagacaatttaaatagagacttttttgtcctatgccacgactaaattttgaatttgagtttgatactcatcttcaagttgctttggtgatttgaatccacagtttgagcgaagttcttgggtgattttgccggcaccgtaaatacaaaggcttttgagccaaattgctttaatttcaccttgaataaacttcttccgaagctttcgcggtgattggtgattatgacgcttttctcgttggtagtaaccacttcttgagattccaacataatcacacataacattgatggaagggtgggattccaaagcgtgctgaacgtccatttcttggtatactttttcggtagttacttgctcagaatcccgattgatttttttaacacttcgatcgctccttcagcgtcacgaagttgacgctttagtcatgcaatctccttgtccttatcgctggcaaaattaccagagccacggccaaactccccagtctcaggaatcagcttacatccatttcttattaataaccgtcagtataataatacaaattgaaactaggattaatcctatcatataattaacttgactcattaaaaaagccaatattgaacccataactacataattactatttgatgtacgtttcctctctagattcatttatacacattcctcgtttcaacttagataccctggttacttattactagccgtaaaattaccatttcttattttaactgcaaatgatccgttacgaattctaaatataacgttaattattaataaatctatgttcttcatagattctattatttttgttgtcctattatcatttgctaaggctaacttatataaattaaccctatgtaatcttcttatcttatttgctggataattaggaacaatacttaaattatattcaagatcatctaatgattctttccaattttctatatctaatgataaattttcacccgaatttttatgaatataaaccacgttatcacagaacttaaacaacctattttcattaaacattaggagccataataaataatcatcagttccgcttacatgcataatattattttgccaagcttctggaatactagattttttaattagacattgaccaggcgaaataattaaatctctaatatttaagtaattagattcaattactacactctttttatagctagaagttgtatatatttctgccgacgtaccatcaaagaattcaaatttaccgttattaataattacatctatatttagcttattcattttcaaaaaactaatttctaattctttaaaattaatagaatcatcctgatccatgaactgaatatactttccgtgtgcagctttcaaaccttctactcttgagtaatgaattcctttatttacttcgttattgattaatctaatgttacttttcatccattctgttaattctaatggttcactcggactatcgtttatcataataatttcaaaacttactctatgcttaaaatcaatattaaagatatattcttttaagtttcgctcaatacgatctaaatattttttccccttataatatggaatgattattgaaatatccaaaattatctcctttaaatacgtttatcgttgaataaattatttaacgacttccaatcacttttgccggagtccctactataatagaattatccttaaacactccattaacgagggtattagcccctataacgcagccatctcctacaatactcccatccagaaataccacacctgcgccaatccaaacgttattcccaattttaattccttgtcggttaacaccttgatttctaattaattcatccttattagaaaaattatgattttccgcatggaatctaacgttttgtccagaaataacatcattacctattttaattccacctgctgcaccaaaaaaagtattttctgcaaaactagaatcattacctattgagattccttttccaatacaatgtaatgaaccggtgcacaacatactactattttctccaatttttactctatcacctaagttaataccctcttcagataatgcgtctaatgttacattactatctaatcgaacattacttcctagatacaatttactaggcaatattatttttacatttcttcctgaaacgagcctttttccacacttcttaataaaaattgacttaaaactcccacgaataataccaaatatatagattcttccttttcttataatataagttataggaacttcatgagataattgaaaatccttttttccactaatttttctaattataccttctaaacccatattataaccctacctatatatagaaacttaataattcatcgacatgttctgtaatattctttacatactcatcttgcttaacatacatatattgctctattttttcagttaattcttcaattgtattaaaccgatttattgcctcgaataagtccttagagcctacattattgcttataaaaacaggagtttggtatgctttggcttctagcgcgaccaatccaaatgtttctttccacttacttggaacaactaatacatcaatatttctgtagatattggctatctggtttcgattgtatttaccatgttgtacgatgccctctatactagatgcaacattgtatccatatgtatggaactcatatttctcagcatccaacaacttggatagtttaataaattcataaaatcctttaaaatattcattcggccctacatacgctattcttattttttttgattcagttttaaaaagtaccttctggtgagtataaatatctttattagttatcgagataatcttatattctttctttggtagttcttctaaattattttcataaactttttttgctactgtactattaaagtggtatttatctattaaactaaaaatatccttgtaataattacgtaacagcttatattctgaatcaggtatatcgttattatcattgaaattgctatttttttgaaatctctcttgttttttagaacttatagtctttattttcttaattagctttcgtattaccgggtagaacttaagttgaaatattctaagttttttagtggaataagcattctctgaagcctttttccaataagcatctgtattatcttgatcatacgacttcttattatagtaaaagctcgggtctggtgctaaaccaaagtaatcatgcgatgtgaatacgattgtgataccttctgacttagcagcactaaaaaattccttaggtattcccatcaaggtatgaatatgaattacatccggcttgatttttttcaataaattaataaatagcattttagaagtgggtatcataaaatctgctggtgttttaattcccccaaaaatcggtagcggtaaactatttattaattcaaatgtcttaatatttgagaaactaccagatttaatctgcatttttctattgataaaattcaatcctccaggaaataaagcataaacctcatttccttgatttatctgttcattcattacatcaaatgcataacccaccagtcccccgctacgagcaggtgggaaccctaaagtatagtgtaatattctcatctatttctccattgtgaacgttttttcataatcagtaacaattttatgccaactaaaagcattattaattctttcggaggatacttgattaaaagattcaacttcatttaatgctaatttttcagaataatctataaccttagcaagatcgtttttatgccaatataatgcaccgtcttgaccaacttccttattaaacccaacatctaacaagagatttaatcgtgttgaagatagcgcttctaataatgaaggattggttccaccaacttcatgaccatgaagataggcaaaagcattttcacgaatatacttcaacaattcagcatcgtatactgttccaacaaacttaattctaggatcagattcaaaatttgttttattttgtaaatctgcataaaatttatttttttcaacatttgaaataatgactaaatccttatccgtagcagagttcataaattctctaatcatcgtttcataattgttttcgggaacaaaacgtcccacaattaagtagtagttgtttaacttaaccgcgtgttttgtgtaccagtctgtgacaacctgatcagtgtccgtcaaacttgatttaatgatatctgacccataagcaatataggttgtcttaggtgaatattgcttgtaatcattttgaatgtacttctcaatattttggctgtcacaaatcaataaatcagcatgttttaccatcaatcgttctgaatacttccaatacttacgaactggcatactccacttagcgcgtaaccactcatgaccgtctggattgacaaacaatgtaccgttgtattgttgtaattgcttcttaaaatgcttaataaaaggccccatccggcaagcgagtacgtaaacaattgcattttgaacattattttttttaatataattcatcgtccatttaaaggcatttacatcatacagaattgctttagcaggtcctacatttggaacatcaatattgaaacaagttgcatcattatattcgaacgtatcagctttattttccgatagatcacgtcgacaggcaacgtaataatgaatattatcgctttccttacgtgccgttaactgttcaacgaaagattcaaagcccccataatttgcaggaattcctttagcaccaataataaatacatttttaaccattcttattctccctgctctagtatgcatcatttggcataatcataattttgaccgttctaaaaagaatgcctaaatcataaaccaaactactttttcgaatgtattttaaatctaattcaaccatttcgtggaacccaatactattacgaccgctaacttgccacaaaccagtacaacctggttttaccataagtcgttgccagtcgtaatctgtatattctttaatttcacgttccaatggtggtcgcggtccaacaagcgtcatatcgccaactaagacgttccataactgggggagttcatcaatactatatttacgaatgaacttaccaaccttagtaatacgcgggtcttccttcattttaaacatcgcaccttcgacctcgttgtacttcaacagattctttaatttttcatctgcatccgtacacattgagcggaatttgtacattttaaacgttcgctgttttaatcctaatcgcgtttgcgagtaaaaaacaccgcccgcgggatcatccattttgatcaaaatcgcaagcacgagaaaaagcgggctcagtaggattagtcctatcgaactcgctatgatatcgaaaattcttttgataatacgataaccataccgttgatcaataacagcttggttaaaaagcatgacttggcgtgtattctcgacctctatcgctttatcaaggttctgcttttgtacttccatatttatacccccaagtttgttactttattcctctgctccatagtaaccaccgtaataaccaccgtaatagccgcccgtattctcagccttcacgcggttcataatggttcctaaaattcgggcattaacgacttctaacaactcttttgccttggcaaccgaacccttttcaacaatcccttgtggtaccaccaaaattgtcccatcaactttgctagcaaggatttgtgcatccgtcaccgatattacaggcggtacatcaaaaatcactaaatcaaaatgctttgttaactcttggattaatttatccatcttcttcgtattcagtaattcagatggattaggtggtacaaccccgcatggtagaacaaataaatgatcaactggtgttttttgaatcgtattagttaaatcaaatgtttcctccgttaagagtgatgtaagtccacgtttgttcggtacttggaaggtttgatggactgttgggcgccgcatatcggcatcgacaagtaacacatcaaccccttgatcagcccaagtaactgcaacgttcgcactaaccgtggacttgccttgtaatgggccagcagatgtgaagacaacactccgtaatttttgatcaattgacgagaattgaatattcgttcgaaccgttctgaattgttccgcaatgactgaagtcggttccgttaacgtaattaagccaaccccttctttcatacttgcttgatctaaactcttttcttttttaaataagcccatttccctatcctcttctcgataagcgactgctacttacgttgacaatcgcttttttaatcaaatctttatcagcaatattattcacgattcctaagctggttaaaccaagttcttctgttaagaaactttcttctttaaccgtcttatccattaattctcgtacaaaggcaatcccaacgcctaataatacccctagcaccagaccaattaagacgttcaagttctttttaggtgacactggtgttaaattcggtttggcttctgaaatgattgagacattgtcagtcccactcataattttcggtgcttttttctggaatgttcgtgctgttgtattgacaatatctgccgcagtataggcgttatcagacttagccgtgattgagaagacttgcgaattttgattattagcaacactaagcatgctagcaagttcaccagcagtaagtttgtggccatcccccttattcatcttacttgccactgaatccataataactggtttcgtaattaagtctttataggtgttaatcatctgaacatcagcttgcacctgattcagctgtgcaccaacatctgtactttgtttacgattaactaagagctcagttgaagcactatattgtggcgtaatcaagaaaaacgtaacaatgattgctaacagcgtacatacaaccgttgatgatagaataaggcggcgatactttcgtaaaatgctgaaaatctgttcaatattaatcgtttgctccatgataccctccaaaattaattaacaattataattactttactccacgctgaaagaagttaaccatcactggttagcttctttcatgattatttcaaatctaattgcttccgtaaacgtgtcgacatttgtgctacctcggttggattcatcacttggaaggattgcccgtcaatcatttgacccgttccttttagttgaagtgtcttgaagtgcatggcatcgccatagttttgttgaatatttaagacatccttcaaagtgatattagtctgcatattattttctaagacttgcaagaatttgttataattcgtcaccatgttcaatgacgtagctttcttcaaaatagcttgaacaattgcttgttggcgaagttgccgaccaaaatctccgcgtggatcgtcgtagcgcatccgtgagaatttcaaagcagttggtccatcaagactgactgttcccttttcgaaatggtgaccttcgtaggtaaagtccaaatcattttccacagtcacgccaccaacggcatccaccaattgttctaagcctttcatgttaactagtacgtaataatcgaccggtacgtttaagaaggcttggacagtgttaactgccattggaatgccaccataggcatacgcggcattaatcttagccgtctgaccatagccaacgattggtacccgtgaatcccgggcgatactcaacatgttggtttccttagtcgttggattgaccgttgcgagcatcattgtatcagtccggcctttttcggttcggcctagttcccctgtatctgtaccgagtaagaggatcgagaaaggcgtcttcttatttagttcgactttttctgaaactttgcgcttattttgtgtcttacctttggatttatacactgtcttggcggtttgattaacatccatatagaccttagctgcgaatgcgcccccggcaagaatcaataccccaagaacaactaaaatcacttttgttaatgtccaccctctgcgccggtgcttatggtgatggtgtcgcttctgttcttctgcagtcatccgtttcgtatcctcctcgaaaactaaacaaaaaaataatcaatcacattacatactatttatactacaatattttctattatagtataacttttattgaaaaggaaatctttttctggaatacaccttaataaaaaacacttagttttcacactaaattgtgaataacccccttaacattgggcggtaattcaatattcaagatttttaaataattaaatatttttaaagtatcgaaagtgaaagtggtttacgaaatctaagtccatcaaaaaaccgatatgtaaaaacattagtttgacatatcggttgagataaataattttaattttagagactaaaaataggttgtaatcatccggttgattcccgaattcttacaacctatataattggttaacgtttcaattcatatttgtgctttgtctcattaatttttcgactgtcattcattttgatcgcgccgacgcgcaatgaagtcatgaaccttaccgcgactggcgttaacatgcccatgcagtgcttcttcaatcacaacattcaagacagccccaaccatcagaatcgttgcggaataattcagccacaagagtaagataatcaccgcaccgattgcaccgtaactattccatgacgtgccgaagtaacgaatatacaatgagaaggcttgtgcaagaattaaccagccaaccgttgtcagtgctgcccctggcaaaacacttcgcaatcgcattttcacattcggaacgaagaaatagatgaaaatcagcagtaggaacaaggcgatccccgtcactggccattttaaactactaaaaatattaacgtatgtcttaggaatgttaaagattgggactaataattccaaaacttgttgcccgaatgtaaaaacaacaattaaaccgactaataatagaagtaataataatgtactccccaaagaaatcaggcgttttaaaacaaagttctgaactttttcaacacgatacgcgcggttaatactattttttaaggcattaatccccatgctcgctgcccacaacgtccccaagatcccgacggacaataagccatcattgcgtttcttcaatagggactgcagaactggcataatcttgtcgaatatcgtgggcggcaccgccgtttggacgtaatccgccacactcattacatctaactggaagtacggtaagatgttcccgataacgattaatagtgggaagattgataataacgaataatatgcgattaccttcgaattatcactaatgcttgcttctgatgaacgcaacatcattaacttcaccacagcaatcaacttctgccgtctggataagtcctgttttaccaccggtaactggttttgattgtctactgtcatatgtcactccaaattctcttttacacattagtcgttctacctgaaaggcttattttcccgacttcttaaggcatatttatcatttctattatacacgaattaactatgggctaatagttttctgaaagcaaaaaagaaaccttctcattttagagaaggtttctgattttatagtaaatatttagcatccatttctggatcttgtgaggttagaatcttaggaccatctttggtaatcgcaattgtgtgttcatattgcgcacatggtgtgccatctgctgagacgtaatattcccagtcttcgccagggacttcttttgacttgatgtgccatgtgccacctaagatgaccattggttcaattgtgatggtcatcccttctttaaggcgcaagcccttgcccgcttcaccgtatgaaggcacgtttggttgttcgtgcatcgttggttgaataccatgtccaatcaattcacggacgtcaccgtagctgttttcaacttcggtatattgttggatggcgtggccgatatcacctaggcgattgccgacaacggcttgatcaatgcctaagtaaagtgctttgcgcgtatcgtccattaatttttgtaattctggtgcgatttcgccaaccgcataagtccagcaagaatcactttcataaccgtccaagttaacggtcatgtcgacactgacaatgtcgccttcttttagaattaagttcttccgtggaatggcatgtgccacttcctcattcacgcagacacaagttgcgtacttgtagccttcaaagcctttttcagatgctttggcaccgtgttgttcgatgtagtcgtttgcgaattcttcaattacccagctcgaaatacctggtttgatgatgtcgcgcaaaccgcgatgaacgccggcaataatggcgccagaagcagccatccctttaatttctcgttcagattttaatgtaatcaaaatgaaacctccaatattgttaccattgtagcctttaattgtatctatttctatattatacgctatctgccattaaaatggacgaatcgtcgctttttagttcaattaaccgtgaaagagccgttgcaccttttcttaataaggggcttttgctataatgccttatagtataattcgttaattgcggccactgagcgccgcgtacgtgaaaggatgtcccaataatggcaactgctaaagtagtctatgcaagtatgaccggcaataacgaggaaattgccgaaatcgttgaagaagccctcgaaagtttgaacgtcgacgttgaaaccactgaaatctctcaagcagatcctgccgattttgaagacagcgatatctgtatcgtctgcagctacacctatggcgatgatggcgatctccccgatgaagccgttgatttctacgaagatctcaaggatattgatttaactggtaaagtctacggtgtctgtggctccggtgatacgttctacgatgacttctgtaaagtggttgatgattttgcagccgtcttcgaacaaaccggcgcaacaaagggttcagacgttgtcaaagtcgatctatcagcagaagcagaagatattgaacatcttgaaaaattcgtatcagagattgttgcaaaacagagtgcgttataagctcggtcagtatccgagcactaacctagtctggcacaggatactagcttataaagcacgtttcaagtcagagtgcgtttgaaacggttatgctttgagcattaactggatttgccgaataggtgatgcaatcacctatttggtaaatttggttaagcgcagaagtatgtttcaacaagcacgtttcaaggcagagtgcgtttgaaacggttatgctttgagcattaactggatttgccgaataggtgatgtaatcacctatttggtaaatttggttaagcgcagaagtatgtttcaataagcacgtttcaaggtagagtgcgtttgaaacggttatgctttgagcattaactggatttgccgaataggtgatgcaatcacctatttggtaaatttggttaagcgcagaagtatgtttcaacaagcacgtttcaaccaatcttccctgggccgcggttacgtccctttttaccgcggcccttcttttggtcttttagaccttaataaatcaaactaggagctgtctttatggctttcattaaacggttagtgtttaaataccgcgattttttgacctatacgatttttggttttttagcatcgttggttaatatttttacttactgggtatttcgccacaccattatttggccgtatttactcgccaatacaatggcgtggtttgtcgcgaatttatttggcttttttaccaataagtcgcttgtattccaatccaaatacaccacgtttggcgctgtgtgtcgtgaagtgctttcgtttttctttttccgtggtgtatcctttttcttggataacggtttgatgattgtcgccatctccttcttagggtggcagagtatgaccgccaagattatcgatcagttaattgtcggcattgtcaactacatcaccacccgctacactttcaaaaaaacagaacaacaaatggcactccgggggcggattctccgtcggtacaatgccattttgaaaagaggtcacaatgattaaagccatccaacaactcattcaaaaatactgggaacaattaatgtacttggtctttggtgtcttaacaaccctagtcaacatggtcgttttcttcggattagaccactatacaactatcaattatctcgtcagcaacacgattgcctggttcttatccgtgctatttgcctttttcaccaataaaacgtgggtctttcagtcaaaatatacaactttaaaggacttttcccgtgaaatggctagtttctttttcttccgtggtatatcatttataatggatacggcaattatgtttgttgggatttccttattggtatggcccaacatgattgttaaagtgctagatcagattatcgtgattttagcgaactatgtatttagcaaatggattttcaaagatacttcggaggattaagatgactaagacgatttcaattattgtaccctgttataacgagcaagaatcaattccgcttttctacgcagcagttgagaaagtagcggctactctagccgaccaccgcatcgaatacatcttcgttaacgatggttctgctgatgaaagcctggcggaaatgcgcgcgttacaggcacaagaccctgaacacgttcactacatttcattctctcggaacttcggtaaagaggctgccttgtatgctggcttacaagccgcaactggcgactacgtttcagtgatggatgttgacttacaagatccgcctgaactattacccgaaatgattcacggcattgaagtcgaaggttatgactgtgtcggcactcgccggacaacacgtgcgggtgaaccccccgttcgttcgttcttcgctaaacaattttacaagattatcaaccggatttcacaaactgaaatcgtggatggtgctcgtgattatcgcttgatgactcggcagatggtcaatgccatcttagagatgtctgaatacaaccgtttttcaaaagggattttcagttgggtcggctttgacaccaagtacttagaatataagaaccaagaccgcgttgctggtcaaaccagttggtcattctggggactcttcaaatattcattggatgggattgtaactttctcagaaacaccattagccattgcgtccttcgtcggctttttctcattcacgattgccctgcttgcattaatcttcatcgttattcgtgctttgatttttggcgatccaacaaccggttggccatcactcatttcagttatcctaatggtcggcggtttacaactcctatgcctagggattgtcggcaaatacatcggcaaaatctacctagaagttaaaaacagaccagtgtatattgtgaaagaaaagaaataaagtgcgtttggttgcacttagcaactgagtattaagacaaaaaacagtttgaatccgcacgtttatctcatcaaaaaaagccctcgccattatcagtcaaaatgataatggtcgagggctttttcaatgctcattatttaaacgcttctggtttttcttttgattgaccaaaatgataagcaattgcatctaaaatccgttgagatgcttgtccatccccatatggattcttggcatgggccattgcttcatatacggcttgatcatctaataattcaaccatggcatcatgaacttgttctggttgtgtcccaaccaacttcaacgtgcctgcttcaaccccttcagatcgttcagttgtatcccgtaagaccaacacaggtttgcctaatgacgttgcttcttcttgcacaccaccagaatcagacatgatgaagaaactccgtgcagctaagttgtggaaatcaacaacatccaatggatcgattaaatgaatccgtgggtgattgcctaagatatcttgcgctgcttcttgcacaacagggttcaaatgcactggatagacgatttcaacatcatcatgggtttcaacaacttggcgcattaccttgaagacccgtttcattggttcaccttggttttcacgtcgatgtattgttactagaatcattcgtttgtcagcatcaacaacatccaagattgaatgattgtagtcgctttgaaccgtttgtttcaatgcatcaattgcagtattccctgtaatataaatagccttttgtggatgattttcttgtaataagttggcttcactttgactggttggtgcaaaataaagatcactgagtacatctgttaattggcgattcatttcttctgggaatggtgaatacttatctcaagttcttagtcctgcttcaacatggccaatcgctgtttgattgtagaatgcactaatgcttgctgcgaaagtagtggttgtattcccatgaactaatacgatatccggtttttcagttgcaatcactttatcaaggttcattaatacgttgctagtaatttcactaagtgtttgccgttgtttcataacgtctaaatcgtaatcaggtttaatcttaaagatttcaagtacttgatctaacatttgacgatgttgggcagttaccactgtcacagcttcgaattcatctgcgcgttctttcaatgctaatactagcggcgccatcttaattgcttctggtcgtgtcccaaaaacagtcattactttaattttagacacaaagctgcctcctattatttaataagttacccccctatactacatgttttctaaagatttgccaatctttaaccaccctacaaatgaataacagtctgaatataaaaaaggacgcctttttaggcgtctctttttaaaaacatcgcttcaacattcgtttgagcatcgcgtctatttctgcgtcactatagtgtaccaacttcgcattcgttagggtcgccaaacccgtaataatgatccacgcttcgttaataatgcgttcgtgttctgactcactaaccgtttttaacggttgatagtcctgcaatctagtttgcgtcaattgccccatgaaaagttgtacttcatccttaccaaagtggttatcaataaataacgcacggtaaagttctggttcgattgtagcaaaacgaatatagccaatcccgagattgactaaggcatcatctgttcgttgttcttcactgacataccacaccaaacgcgccttggcttgttccaaaatggcttgcttgagattggccatattaccgaattctaaatagatgggttgtgtcgaacagtctagtgccttggcaaggctgcgcgctgtaattgcttttaaaccatccgctaataccatttcgtatgctttatccagaatttgctccgctttaatccgttttgtccgtgccatcgttcccactccttaaccgatcaatccgtttttcaatattatctactgtcactctaccacaaaattaaataacatgaaaacgtttttatctgttttacgagttttttaaatcgccatgtgctatgataaacatattaaatcgcccttaaggaggaatttttgatgactactttccaacataatcttgaaaaatacgccgctttagtcgctaagacagggatcaacgtgcaatccggagacacagtggtgctccaaatcgctgttacgcaagctgaattcgcccgtgatatgacagctgcttgttatgacctcggtgcagccgaagtgattatcaaatggcaagatgatgacatcgatcggatcaatatgcaacacaaagccgaagatcgcctcgttaacgtgccagacttccagaaacaagaatacgattactggttagcaaataacgccaaacggatttcggtgatgtcgagcaatcctgataaccttaagggtctcgatggtgatcgggtcgctgctgttcaaaaggcaaacggtcaagcaatgcttaaagttcgccaagcaacacaagccaacaaaaatagttggattgtaattgccgcagctagtcccgcttgggcaaagaaagtctttcctgatatggacgaacaagccgcaactgataagttatggacagagattttcaaaacaacccgggtagataaagaagacccaatccttgcttgggaacaacatggcaagaaactgcaagccaaagccgctgaattaaacgctgcgcaatacaaagcactccattacacagctcctggcactgatctcacaattgggttacctgaaaaccacatctggatgggtggtcctagccgtagtagtgatggtcgttcattcgtcgctaacatgcctactgaggaagttttctcagcagctgatgccaacaacgtcgatggctacatttcttctacgaaaccattgagttacgctggtaacacactcaataacatgcaatttacttttgaaaacggcaaagtggtcaaagccaccgctgaagaaggcaacgatgtcttacaaaaactcttacaaaccgatgctggggtcaagagcctaggtgaagtcgcacttgtaccagatccttcaccaatttcacaatcaaagatcaccttctacaataccttatttgacgaaaatgcttcaaaccatttggcactcggctctgcttacgccttttcaattgaaggcggcacagatatgtctgaagaggaattaaaagcagctggtttaaaccgtagtcaagcccacgttgacttcatggtcggttctagtcaaatgaacatcgatggcttaacgcacgacggtcagattgtccccattttcagaaacggtgactgggctgactaatgattacatggctcatgctccttggcgtctgcgtttgtctaaccaccttcttcattggactaaccgcctatagcgcctaccagaaacaagcgattggtggtctaatcattgtgtgcgttgccggtttagtcttaaccgcaatcacggcattcttctactaccaagcactgacgcatttataattcgaaagggtcgcgacaaaatttttgttgcgaccctttttgatgtgctagactgttggcatactttttgttcactatatcattattcgttagtaataatgattcgtatgtactggtataacaggttttatacaatgtttttgttgtgaacaattgctcaaaaacaattgataatccttctcaattagctataatgaagttaaatcaaccagaggagtccgccattatgaaagaattatccgccagtgcaccactcgaacatcgtttccatttatcagaacgtttgaacattatccgcgccggcgttttaggtgcaaatgatggcattatctctgtagctggaatcgtagtcggtgtcgcgagcgcccaccaaagtcagtacacgatttttcttgctggtatttctggcatgcttgctggcgccttttcaatgggtggcggtgaatacgtctcggtcagcacgcaacgtgatacgcagaaatccatgatgcggcttcaaaaagaagccatccaaaacgaatacgctgctgaagtggccagtctacaacggacttacgaatcaaaaggcttacccactccacttgcacatcaggtagcttcagcgttcatgcaaaaagacagtctcgacatcacactccgcgaaaaatacaatattgaattacaccattacttcaacccgtggcatgccgccttttcatcatttttctcattcatgttaggctcattgctgccaatcatcgccatcctagcaattccatacccttacaaagtcagtggaactattggttcaattgtccttgcccttatcgcgaccggttacacgagtgcaacgttaggcaaggcaaaccgactcaaaggcgttttacgcaacgtcttaaccggcgtcttaaccatgatcgtcacctatttaattggtggttctatcggctaagcttcacttttaacctaaaatttgctatgctatatttaatttaatcgtcgccaccgggcagttaatcacttcattaggtcaaagaagaagtgattggctgtcctttttttgtggccgatattattaggaggttctattgtgtggcatgggttgatttattgattgcaggattggcagaagtttggtgggcaacgactatgaaaatgagtggtgggttcactaagctcaattacacattactgacgattgctggcatgctcgtcagcttcggttttctaattcgtgcgacgaagggattaccattgagcattgcttatccggtttggaccggaattggcgcagtgggagctattttagtcggcatcatcttattcaatgaacacatttctttattaacctggctattcgttattttattagtaatcggaattctcgtcattaaaatgacgagtggtcattaaaaaataggcttacccattttgggtaagccttatttattaacgtgttctaattgccaactcgcgatagtttgaatcaactcgattggtaatgccgttacatctttttcgaattgtagtgtccctttgccggtctgacatggtgcgacagcttttgcaaaatgggccatcggttgattagtgggataaaacccaatgtgccgtttattaatgccaaaatagcaaactgctttaggctgataatacccaaccaaaccataagccagcttcatctctgcgtccggtaacactgcccaaagaatggtgtgcattgccagtgcgagtgttcgatcagcatcagttgtaaggcctgcattatattgctcaataactgtcatcttatccccacctttattttgctctcattctagcatgaaacctcaaaaaaagcccaaccgaagttggactcttgaaaaaacaataattatttaacagctggtgtaccgaaccattcgatacgtgattcaactgtgtctttgattgcttttgtacctggtgcaagaactttacgaggatcgaagcctttttcagcttgatctttgttttctgcatagtattctttaacagcgtttgaccatgcgatttgttgttctgtattaacgttaacttttgagatacccatttcgattgctttaaggatttgttccttaggaatacctgaaccaccatgtaatacaagtggtaagtcaatagcgtcagctaattcttgtaaacggtcaaagcttaaaccttgccagttttcagggtatacaccatgaatattaccaataccaactgctaagtagtcaggaccagcagctgctaattgtttagcttcttcaacgtcagctaattcgccagcaccgatgataccgtcttcttcgccaccaattgaaccaacttcggcttcaactgagatgcctttagcatgtgctaaagcaacgatttcttttgtctttgctaagttttcttcgaatggtaaatcatgaccatcgaacataactgagttgtaaccaacttcgatacattctttagcagcttcgtagttaccgtgatctaaatgcatgataacaggaactgtgatgttcattgacttgattgtttgttcaaccaagttcttgcataattcgtaaccacccatatatttagcagcacccattgatgtttggatcaagattggtgtgttagtttcttgagcagcacctaagatagcacgtgtccattcaaggttgtttgtgttgaaagcaccaacagcgtaatgaccttcacgagcagctttaaagatttctgtaccattaactaatgacatgaaaaagcctccagattaattgcaacttttgcgttgcgatttttgaatacgaatctattttaacatattttcacctaatataaatcataaatccgtaactttctgaaagtgaaagcgtaatcattctgcttgattattttacaccaattaaaaagcacactagttaatctagtgtgcttttacgacaattgcttcaaagtgcgcccggcgagaatcgaactcgcaacctatcgcttaggaggcgattgctctatccagttgagccacgagcgcctatgagtcatattgtcgcatctgttgttttaattgtaaagttgattttaataaatctttattcatccgttaaaacggcgttcatcgtttcttgacctaaaaagaacacggcaccagccgctaatagtatcgcacccgtaaaaagtgtaaaaatcacggctactgataccccctgctgaattagcgcaccaactaaaaatggcccaaccacaccgccaattcgcccgatgccagctgctaaaccactcccacttccacggacaagtgcaggatattgttctggggtataagcatatagcgcaccccatgcaccaagattgaaaaaggataacagcgcaccggccacgagtaacatggcaactgagtttgcattgccaaacaataatgcactgagtgctgttccgattagaaagccacctaaaacacgtttccgcccccatttttcaatcaaccatgctgctacaaagtagcctggtaattgtgccaaggtcataatcagcacatattcaaaacttttaaccaagctgaacccttttaagaccatcacactggggagccataaaaacatcccatagtatgaaaagaccactaaaaaccatacgagccataacataattgttctttggcgatacgctggttcaaataaaacacgcaatcgttgcatgaatggtaccttacggttaatcgtcgtcggttcatgctcttgtttaacatgtttccgtaacacaagtgtgtagatggcgggcaatgacgtgatcaataagaccactcgccagccccaaactggaatgacaaaataggcgagtaaactggcaactaaccacccggctgcccaaaaactttctaacaatacgacagcccgaccgcgcgatgccgttggcgtattctccgagattaatgtcgaggctaccggtagctcgccacccaacccagcaccgaccaataaccggagtactagaaatagactcaacgatgtactaaaggcagatatcccattgccaatcgaaaatactaataaggaacaaagtaaactgttttttcgaccaattttatcagctaaaatgccgaaaataacggcgccaaaaaccattccaattgaactgacactcccaattaatcccatttgtgcgctactgagttgccactctttggcaagcgcagcaatcacaaacgatagcatccccacatccattgcatcgaacaaccatgcaccacctgcagcccataaaagtgtcctatgttcttttgtcatcccgcattactcccttatgttatgaatggtcctatcatacaaaaagagtttacagatgtcaagacacctaattatgcattataataaatatttatctgtttaagcgctgcgacaatttgcttaaatcgttgttttgacgcgcattcaatcgtgtgtaaatgaatgccgtcggttaatgttgaaagtaatttctgatggggcattgtggccattttttgcataaagcctttgacatctgtcaaggtgccgattcccagttgaccggtcagttcaccatacaatggatgatcaacggtcacgtcgatcacgcgccccccattttcaacaatcgttgtcaattcgagttcagtctgcccctgattatgctgacaggcaacttgtgcctgatatggcattgtttgttgcgtctgcgtttggtcgtaataaccgctaactgtcgcaataatttgggccccttgtgcgcgaagtaaggcgatatccccaacaattgtctgccggctaactttatattgttgcgctaatactttggcactgatgggttgcgcactcttttgaattgcattcagaattgctgtacgtcgttcttgcgttgtcatattgccacctcgtcttgatttcttacgctatattctaagcgttctaaaggcaaaaagaaagtggagggttgaaacgaactcgtttttccggataacctaaaaatacatattatggcttaaacccgccataatatgtatttttctgttaatcctcaaagccaacccgttcgactacgcactcttgttttaaacgtgctgcttcgaactgccttttccggttaacctaaaaatacatactatggcttaaacccgccataatatgtatttttctgttaatcctcaaagccaacccgttcgactgcgcactcttgttttaaacgtgctgcttcgaactgccttttccggttaacctaaaaatacatactatggcttaaacccgccataatatgtatttttctgttaatcctcaaagccaacccgttcgactacgcactcttgttttaaacgtgctgcttcgaactgccttttccggttaacctaaaaatacatattatggcttaaacccgccataatatgtatttttctgttaatcctcaaagccaacccgttcgactgcgcactctatagtatttccccgttacttttaatgactttttggtaccagtaaaaactgtcttttggatagcggtttagttctctttcttctgtttcgtcgcgatccacgtagacgaagccatagcgtttttgatagccgtttgtccaacttaataaatctgtgaagctccatgtcgtgtaaccgatgaccgaaacaccatcggtaatagcttcgtgaatggcttgaacgtgcgcctttaaaaaggcaatccggtagtcgtcgtgcacttgcccgccttctttcaaggtgtcataagcccctaaaccgttctcagtaattaagaccggcagtccataacggctctcaatacgtctgagtgcgattcgaagtccttcggggtcaatattccaatcccagtcagtttgttgcatataggggttatcagcggtcttgtagacgcctggcaacccacttgcttggctagtgccctttttaccggaagtattttgcttggtcaaaccaacgccaccttctagtgggttagtcgtaactgtcatcgtctgatagtaattcaaccccataaaatcgggatgtgcgagtggatcggctaataaagcttggtccgcttcagtaatttcgggtgcaatcccgtttcgttcgagataagtcatcactaatttcggataacggccccaagcataaacgtccatccacaaatcagcgttaatttgttcggcattatcagccgcaatttgattttctgggtccgcattcagcgcataagttgggctgtaggcaaaactaggtccgatgcccccttgatagcctttttcatggaataatttaatcacactagcattggcaaggtttgccatatgattagcttgataagttcgcttagcatcagtcactgctggcggatgctccgctgttaaatagccgtgagtgatgaagacattttgttcgttcaaggtaacccaatgttgcacacgatcgccgaagcgttcgaacaataagcctgcgtagttggtaaaatcttcaataatttgacgcgattcccaaccgccatattcggcttgcaacgcttgcggtaagtcccaatgataaatcgtcacgattggttcaatatcattggcaattaatgtattaattaaacgatcataaaaggctaagcccgcctcattcacagcgcctttaccatttggtaagacccgtggccatgaaatcgaaaaacgataggctttgagcccagcgcgtgccattagcgccacgtcttcttcgaaacggtgatagtgatccaccgctacatcaccattcgtggctttgaacgttttgcctggaatgcggacaaattcatcccacacagaacggcccttaccatcttcttggtaggccccttcaatttgataggccgcagaagctgaaccccacaaaaaatctttaggaaatggtgctaattgatggtattccattactggtcatcctactttctctcaaagtcattgcttattgttctgcttgatatgttttttcgatttgtttcaacattttcttaaagccgcgtttacgcatgaaacccatgacaaaggccatcaacatatcattggtttgttgtaatttaccatttgctttggcattttcgcgatagataacttcaatagactgcggtccattcgcgaaaatatcgtaacttgattgatagctcccccgggtagaagtcgtttcgtagtgataactctgatctttaatcagttgcgtaatcttcaatgtcgcccgattcttgccaaattgcttgtcgtacgaataattaggcaactgcgcttcagttagtttatccccagtttgttgcttaatatcaaacaacactgattccagaatcttctgataaaaataactagctggcatttttaaatttaatttaatttccatcccgttcccactcttctcttcaatgtgccatttgttgcttttaactaaaaagagctcgaacaaaagtcattttgtcctagcccttttgttcattagccaaactttaatcgactggtacaccggccatcttcttgtaaacgtcaacgacttcgcctgctaaatcgcggaaagtaattgcgttcatcaagtgatcttgtgagtgaaccgtcaataatgtcacttgcatgtgatcgccacttgcttctttggttaacatatctgtttgtgaattatgggcttctgataaagcagcatccgcttctgcaagtttggcagctgctgtttcgaagtcacctttcttagcggccatgattgcttccattgagctactcttggcgttcccaccgttgataattaatcccatgattgcttctaagttctgttcttctgccatagtatggcacctcctatgatcatctcatcgtgaaccactttcgtaaccattcattaattggtctagatatttcttcgagaatgactaaccaatccattaaaaggctttcaaaaattagttcctgattgtgagagttcgccactatcgcattttacgaagcgaaagaaaacccttacttatattgtaatcgcttcctaagatttgtcaattaattactgataaccttttcacaaacggactagtccaaaaaaagaaaccttaacaggttgttaaggtttctcgctcaatctggattagaccactagtcattatttttcttatggtagcccttattcttttgatttcgtttacggtttttcttatgttttggttttaatggtgcagctggctgttggcggactggtactaatttggctttgcgcgcgcttgtcgttggcgtagccttttgtacttgtccttctgttgcttcaccagtagttggtacagcagatgttgctttcgttgcagcaactggtgctactttaggcgtcactggtttttcggcttccaaatgatcaccaaccaaataacgggtcacaagatcatattcaggcgccaataacttacgcaaattccgcccatcgtgttgattgcccaacgtcaaaacagtcccggtgcgtcccatccgaccagtccgaccagcacgatgaatgtaagtgatttttgcgtttggtacatcaaaattaatcacataaggtaagtcggtgatatccaagccacggccagccacgtccgttgctagtaagagttgaatcttaccttcacggaaatctttgagcgctttttggcgttctgtttggcgaccttgccctgagagtgcggcatacgttactttttgatgttttaacgtttgtgcagcttgtaagagttgcgcggattggttaaaaatgaccaaacctctaaaattcttttgatgtgctaaatggcgtaagacgttcactttttgagcgttaccagttgggataaatgcatgcaacacttccccacccgtcttatcaatcccacgcacgtcgattgtttcgattggcacgccgaaccatgtttccaactctaataagatatcggttgatgtcgctgaaaagaagccaagttgcacatcggcaggtgattcttgcacgatatggcgggtttctgaaagcccgctatccgtcaataattcgtcagcttcgtccataataatcgcttggagtgtatggaatttcactttccgttgttcgctcaattctaataaccgaccagtcgttgccacgataatctctggtttggccttaagccgttcgatttggcgtttaacattcgccttccccgtaatcgcttggacattacagtcgattgccttggcataaggttgaatgacgtcccgtgtttggatcaccaattcctgtgaaggggccaaaattaagacttgtagcccttcgcctggcataattttttctaataacggcaatgaaaacgcgagggttttcccagaacccgtgggtgccagtcctagaattgattggtcttttttcagtggttgataaactgcctcttggatgggtgacatttctgtaaatccttgttcatcccatagtgcttgaaatagtggtgaaacgctcatgtattgcctccgtcatgttaatctgcatcaaatgttattccggccgactgtcttaattgatataaaacttggttgaccgattcacttagctgtaataattcatgataccgttttgtgtcacgattagcaatcatcgccgcgaaattttctgcctcagcaaccattggattagcaagtgattgttcccctagtgactcaatcttttgcccaccttcgctgtagcggtcaacactgccgattgtgccggcattatcgaggacaatcgtcgtttggccaccataaatttcagacgttagataggaatcaacggttttgccaaaaatcaacgtgacgttaaaggttggataacgcagtgttgcgacccctttaccatccactccagttggtaacaattcagcttgataatcgactgaatcgggcacaccaaaccagctgacggcatcatagacgacatacacgccgagatcttgtaaagctcctccagaaaaatgtggtgagaaaatattcggttcttcacccgctaaaacagcgtcatagcgtgatgaatatttcatatagctcaaggtcgcgccattgatcgccggtaatgcgttgatggcttgttgtacaatcttaaagttggcctcatgaatatgacgtgctgcttcgaataagaattggtctggatgttgctttaataatgtttgcatggctgccatttcagccggattactgaaggcaggtttttccacgatgacatttttacccgctaaaattgcttgcttcgcttgttcaaagtgcagactattaggtgatgcaatgtagacggtttcaaattcattggcattcataaacccgtctaagtcagtgtaacttgtggcttctggtgcgtgatacttcgttttaaattggtcggctttatctgccgtccgtgaataaacagctgttaacttaaatgattcagattcccgggccgcatcaacaaattgtcccgtaatccagttagtcccaataatcccaagtgtttgcattataatcagctcccttatttaatactgccagtatacgggatttagatctagaagcctatcgaaaagtttttctactgataagaattccgccactattcacttctttaaccattccttaaaaaaacagtcgtgagtccgataattaattgtccgcaaactaactatttcgtggtagaataatagtaagttggggtgtgacttatgcgattttttaaatttcaaaaaccacaagcaattttaaatcgaaccattcaccagtatcagcaaaaagttcggacgactcaagcgagtaaagtagcgactttttatgctggacactggtcttttaatgacaaccaaacccgaaaaaaacacacattagaaattactccgaacttgttggtgcaaatcgatcataagccattgagtggtcaagtcatttccctcacggaaaacgaattggtctttctcgatcactacggctatcaattaaaaattacttgtgaaaatcaacggcccgtttcaatttacgatgaagccgaagatatggattatccaatcgaatagctattaaaaaaggcccataacgcttagcgttatgggcctttttagttattctttatttgttcaacattttttgagctttatctgggacttcgtttttggcaaccttttcccatgaaaccacacccttatttttattgacgattaatttgaggtacgcatttcgtttaagcggcgttgatttattaccattaaaatcaacttttttggtaacaccatcttcattgtaggctgcttgttgatagttataatcgataaccgtttcccctgctgaatccttttcttccattcgtgttccgtttgaaacaatctgtgtatagtaggcttccccaccgtaataatagctatgaattccccaactaccaccgatgaaaaccaccacgattgcgattaataataaccagcctttgtgtttaatcattattttctctccgtttctatttaatagtctgccattgttgcttggtgccagtaaaaactgctaactgatagttcgtctgattatcactgtttggaatctgactagccattgtgtattgccagaacccgttcttagtcgccaatgttggctgttcccgcgtagtttgccacaatggatagtctcctttgtgtggcacataccgttttaataagctgggtgcaccaccaatgagacaattttgatgataatgttgattaatcaaggtcactagctgcgccagtgccatttgcgttttcttttgtgcgggcggttgttgtgcatagtcgttataataatccaaatagatcataattggtaaatcacccgtctggctgccaactgctttaaaaagttggtcagcttggcgttcaggcgaactatcaaaactaaaaaaatgaaagatgcccacgcgtaagccagtgccacttgctcgactgtaattggtgtcgaaattatcatccttgtaactggccccttcagttgcttttaaataaacaaactgaataccgtccttttttaacccgtcaaaatcttggtaaccatctgactgacttaattgcatccctagaatcggatattgcgtcgcgcttggtcgatccgaacggtgtttcaaccaccagatagcaccaccaagacacagagctaccgcgataatgccgataattatttgtcgccaatagcgcttttggaaactgtcttgaaaaatcggtgtcacttttcgtctcatccacggttcctccatttccagccttagtacgcttagtttactatcttcatgcattcgagacaagccacctaacaattttgttcgttactgtcacttagagttgccttttattggtaatcagatacaatgtgaacaaagggaggcggaatatgttagatgaacgcttagtggggttaacgtttactttacaggatgctaaatcaaccggcaccgttaatttttttggcatcttatatcattaccgtgtcgaaggaccagctagcgctggcttactcgtcatggtaacggccgtcacacctttagctttaatcgtgacagcgcaccacaatattctggcgtattaagccagacaaaagggagtttttattatgggtattttcatcagtattttagtcattcttgttttagttattgttgcagtcaccctcttttcatcatttgccttgattcataccggggaagttgggattttggaacgcttaggggtctacgttaaaacgcttgatcctggtttccatttggtcattccattcatttatcacatcacagaaatcgttaatatgaaacaaatccccttaaaagtcgctgaacaagaagtcattaccaaagacaacgtggttgttatgatttcggaaacgattaaatatcacatcactgacgtcaatgcgtacgtttataaaaataaagattccgttctaagtatggtccaagacacccgtgcacaattacgtgggattattgggaacatggacttgaacgatgttttaaatggcaccgaaaaaattaaccaaaccctttttgaacaacttagcgaagtaacagccggctacggcttaaacgttgatcgggtcaatatcgattcaattcaagtggcccacgatatccaagaatcaatgaataaattgctccgtgcttcgcgtgaaaaagaagccaacattatggaagccgaagggctcaaagccgccgcaatccgtaaagctgaagggttaaaagaagcgaatattctagaagccgaagccaataaacaaacacaaattttggaagctgaagggaaagctcaaagtgaacgaacaattgccgaagctgttaaagatcaaattaatttgatcaacgccagcttagtcaataacggcgaactctatcttcaatataagaatattgaagcgatggaacacatcgcagacggtcaaaataacaccattgtcttgccaaataagtcaatcgatagcttgggtaatttgccagcaattggtgctctggttcaaaaagaaagtaccaagcattctaattaatgaatgccaataaaaaaggccccagaataacaaccttactgttattctggggctttttttattggtcttctgaaggtgttgaatccttaggtgttggttgtgtattgcgggtgttctttttgctgagaatgtattgttctaacaaggccacaatctgttgattctgtggtagatcagagtgttgtgcttggtcacctgtcaccgtaatttcggtgtagtgcttgacttgcccttgataaatgtacttccccgcctctacactacgcgcgggtacaatcccatcattttcaaagttttccgttcccgcaattgaatacatcgataagttcgtcggaatatttttacgtttcttaatgaaatccgtcagcatctgtgacttatgcgtaatcgatgtttcggaaaagttatacggcgaaccaatcgtcatcaacttcttcactgtaatatcatcgcgattaaaataatcttccaaaaaagctgtataaattaagccaccattagaatggccaaccgctttaaagttattaaattgatacttcttagtcaacgcggtaaatgcgagcgaaaaccatttagcttgcttttgaatattactgtaaccgtccttattattttcaaaaccaaccacgataaacggttcattatcccgcggtttaatttcccctgaatagctaatctgattattttcatgcacagttagttttaacaagctgtgccgattcccgcggttagcgttcaatttagccactaattcatcaaaccgattttgggttgcactactccctggaataaaaattaccggtgacattcgtgaatcatggcgcttagctaaggtcataacgctctggcgactccattgagcagctggccacattaatccgccgatcaaggccaaactaatgactaacaaccagaggcttttttttcttaatttggccaatttatgccgcctcctttacaagtgctaattgatctgccaattggacaaacggcttgtagatcatcacgccgacgacaacgtttaataccgtcaccgccagcgcgactaaatcaccgttggtgcccatgaacgcttgcaataagccgggggtcccaagtggaaccgtgaagactaccgatggcatgagattcaatgcaactgctgccgatgcaatccccatatttaccagtggtaccaataagaatggaatcacatacaagccatttccaatgacaggcattcccacaaggaccgcgctattaaagttaaataaaacgggcaacagcgaccatcgaccaatcaaatgataatccctttgtttgctgaagatgaaaacggcaatcactaaggctaatgtcccacccgtcccgccaatcgcaccaaagggttcatacaaagtccctaacgtgaacggatatggaacgtgccaagccgtgtgatgactaaacgcatagtttaagttggccgaagatgcgattccctcacgcccaaattgggccaatgttggcatactcgttaatccaaaaaaagttaagctagtggccgctaaaccagtccccaacgtgaaaagcagacccgtttgatttgcttttagtgattgtaatcgtaagatgacttgatctggcaagattgaaatcgccaaccaatttagcaggatactcagccctaaaatgacgccgagcaccaataaaatcgcccacatagaatccaatgaacgtcctactgctgacccattcagcggtaaatcacgccgatgaggtcgtcctaattttttgaaggctaatccagtcagatagccgactaataggccaaaaaataagccccccattcccaacatctggctattgaaagataagccctcatttggcgtcaaccgtaacgctaagattaaataggcaatgagccccgtaatgctggctaattgttcatcacgcttatagtgtttggctgtatagcgcgccgcacacatcgctgctaatgccgcaacgattcctaacgtcaaactcgtaatgctgtcaaacatcatctgaaagatattccgtttactcaaccaattcgaaagatgaaatacattcacaacaaaactattccggttaaaaagtgctagctggatgagttggctgatactcccaatcaagacaaatggaaataacaacgttaaacttcgctgcataatctgatagaccgccgcggattggaatcggttaaaatgttgcgctaagcgcatcattatagattgttttttgacattcatgcgttaaccctctaaacatgttttgataatttcattctagccgaccttccgcttaaatgcacgtctgaacgcaaaaaacgggtcgctactttccatctctggataataacgacccgctaaaacgtgctttttgtggcaacttcttccgtctagctacgtctgtcaaatcaccaacttgttggttattcgccagcctaggctatactcagaagttaaccgccacaaacgcactctattttgaaacgtgctttttgtggcaacttcttccgtctagctacgtctgtcaaatcaccaacttgttggttattcgccagcctaggctatactcagaagttaaccgccacaaacgcactttattttaatactaatttagtgacactttcgacgtgtagcgtttgtgggaacatgtcgactggttgtgtgctttctgcttggtagccttgggctgccaatagttctaaatcacgcgccaatgttgctggattacagctgacatagaccatcttggctggttttaattgaccaacggcttcgatgaagctagcttccaaccctttacgtggtgggtcaacaatcaaagcatcgacttttaagtcatctgcttgccattgcgccatcacttcttcggctttaccgagtgtaaattcaacgttttcgatgccgttaatcttggcattgtgccgcgcatccataacagctgattcaacaacttcaacaccgtaaacttgcttagcatgtttagcgactgctaatgaaatcgtcccaatccctgaataagcatcaatgactgtttcgttcccggttaattcagcagcttcgatcgccttattatacaagacttccgtttgcactgggttcacttggtagaatgattgcgctgaaatttcgaacttcaagcccattaattcatcacgaataaagtcgcggccagcgattaattttgtttcgtcaccaaagatgacgttcgtttgagcagcattgacgttttgcatgatgctgaccacttctggtaaagcttttttgatttcaacggcgatttcacgggcagccggtaatttcttactccgcgtgatgaagacaatcatcatttcgtggctgtaataaccgcggcgaaccataatggtcttcaaaacacccttatgcgtatcttcgttgtatggatcaatgtagaaacgacgcaagatatcacgaatgaccttgatagcttcatcaatcttaggatcttgaatgtagaagtcttccattggcatcacttgatgactgtgtttccggtagaaaccagttgttaaagcaccatcgataaaccgaacaggaacttgcgccttgttccggtaacctgttggatcatccatccctaaaacaggttgcactggaatatctaaatgggctttttggaagacgttcaagacttggttacgcttgaaatctaattgggctgggtatgccaagtgttgtaatggcgcaatcccagtttgtgagtaaatgttagcttttgattcaacgcggtctgggcttttcttcaataaattaactaagcgcgcaaaaccatattgtttattgacctttgtgacttggatttctgcttgttcatcgggcaaaacgccttcgataaacaacggatagttgtcgactttagcgacacccatgccttcataggttaaatccataatatcaaccgtcaatgtttcattttttcttacaggtgcttgtattttcatagttacctctttttaattgtgtaaaaagagtctgagacaaaactgagttttgcttcggactcttttcttagctacaagtgtgcggtcaatccgcccacgttatccaatgttccagtttaacctattttaccatcgccgtctatgtcttcttcagaaattgcttcgacttcctttacgaataaatcttcggcagactgctgagtaggggtttctgatgtaatagcgtgatctggaatatcttccttattcacatacatctcgatatgttgttgcaagttagtaaaggtcattggtgcatcgccaccgtattcgccatctaaattaatcatcatcttaacgtcatcatcaccaggacgcgcaactagttttgacgtcttggtataaatgacccgtggatcattaacgtgtttgccacctttaatgacgagtgcgattaaatggactaattcggccatgttggctgtcttaaccacaatcaatgagaaattaccatcattcagttgtgcatccggcgcaatctgttcaaatccaccaactgaattggttaaaccgagtaagaatagggaagcttccccatcatacgtaccttcatcatattccagatgcatcttaatcggtttaatttggggtaacatctcagcaccttttacgacatacgcgagatagccaaaaattgacttaaagtctgaggggacttcataggtcaattcggttagcaaaccaccaccagcaatgttcatgaagtaattgtcattggcttgaccgatatccatcttaagcgtttggttcttcaaaatcacgcgggctgcttcaaccggattatcacgcggaatcttcaaagcccgagcataatcgtttgttgtcccagccggaatgacggccatcattgggcgtttttccaagccggcaatgccgttgacgacttcattaattgtcccatcaccgccagcggcaacgattaaatcgaagtccgcctttgctgctcttgtggcctctttttgcgctgaagcttcttcaggcgttgtttgaaaagcactcgcttcataacccgcttgttccaaaatatccagaatatcagcgacactacgtttcatcacttcatgtcctgaagttggattataaattaaccgtgcacgtttttgcattcgaatctcctaaaatatcaattatcgtttgttcaattcggccatcaacaagtcattgacaactttcggattagcttgaccccgtgtttccttcataatcttaccgactaagaacccaactgcgcggtctttaccgttcttgaaatcatcaattgattgttggttgtcatctaaaatacctgtgatgattggtgtcaacttagcagggtctgataattggaccatgcctttagcttcaacccaggcttttggatccgtgtcattttggataatttcttggaagactttcttagcaatcttcgatgaaataatcccgtctttaattaaattgatcatttgggctaagtgggcaggtgtgagggccgtttcttgaaggtcaatttgtttgtcgttcaagtaagcattcacttcacccatcaaccagttagaaacttgttttggtgcggcgccatcagcaacagctgcttcaaagaagtcagacatttccttggtgttcgtcaagacacccgcatcgtattcaggcaagcccaattcatccacatagcgtgcacgccgtttagccggcatttcaggcatattgtcttgaacttcttgtaaccaatcatcaccaatgtgtaatggtggtagatctggttctgggaaataacgatagtcatccgcaccggtcttaacccgcataaggaatgtttcgcccgttttttcgtcaaaacgacgggtttcagggcgcactgtttcgccagcaatcaaaagttgtgattgacgcttgatttcataagctaaccccaaacggacgtgattaaaggagttcaagttcttcaattctgatttcacaccatattgcttcgcaccgattggtcgcacagaaatgttagtatctacccgcattgaaccttcttccatcttaacgtcagatgcgccagtaaattgaacaatttggcgtaacgtttcaaggtaagcataggcttcttcaggcgttgacatatcaggttttgaaacaatttcaatcaaggcagtcccttgacggtttaaatcgacatatgaatagccgtcagagccatgggtattcttcccggcatcttcttcaacgtgcaattcggcaatcccgatttgctttgtatggccatcgacttcgacttcgatatagccatctttaccaaggggttgttcgtattgtgtgatttggtaagcttttggattatctggatagaagtaattcttccggtcgaaatgcgtatcgcgcgcaatatcagcgtgcaaggcagtcgcaaccatcatcccaagtgtgtatgcccctttattcaaggttggcaatgtcccaggataaccccagtcaatcacattcgtgttagtattcggttctgcaccatagtttacaggagatggactgtacatttttgaattggtttttaattcaatatgcacttcaagtccgattgttgtttcgaaattcattaggcttttcctcctttgaagcttggaacgttcttgttaaattgagttgcttgttcaaaggcataacctgcgcgataaacagattcttcatcaaatgctttcccaataatttgtaaaccaactggcatgccatctactaagccggcaggcactgacattgctggtaagccagccatgttagcaggaattgttaagatatcgttcatatacattgtcactggatctgatactttgcgacccaagtcaaaagcggtggttggtgttgttggtccaaccactaagtcgtagtctgcgaaaactttttcaaagtcgcgcacgattaatgtccgcacttgaccagccttcttgaagtaagcatcgtaaaagcctgatgaaagggcaaacgtccctaacataatccgccgtttcacttcatcaccgaaaccttcagaacgtgatttaacatacacatcttcaagtgtcttggcttcaggtgaacgataaccataacgaatcccatcaaaacgtgacaagttagatgaagcttcacttgaagccataatgtagtaagtttggacggcatacttagaatttggcaagctgacttcgtcaacggttgcccctaatgatttcaaagtttcaatggctgtttcgatttgggctttaacgcctggttcgacaccttctgccatgtattctttggcaacagcaatcttcatgcctttgatgtcaccatttaaagcggcacggaaatcaggcactgggatatcagcactcgtactatctttttcatcatgaccactgatggcttgtaaaacagtcgcattatcagcaactgtccgactaaagaccccaacttgatcaagacttgaagcaaaagcgatcgcaccccagcgtgacacacgaccgtatgttggtttgatgccgacaatcccattaaatgcagctggttggcgaattgagccacccgtatctgtccctaaagaagcaacgacttcaccggccgcaactgctgctgcagaaccacctgatgaaccaccaggtactttgtctaagttccaagggttctttgtcttcttgaaggctgatgtttctgttgatgaacccattgcgaattcatccatgttgtttttaccgatcacaattgcatctttagcttttaatttttcaacaaccgttgcatcaaaaaccggcgtgaaattttcaagcatcttgctggcagcagtagttgttaagccatctgttaataagttatctttaatcccaattggcatcccagctaataagttatctgcatcaattggttgggcgtccactttggcagccgcagcttgtgcaccagcttcatcgattactaaaaaagcatcaacttgtggttctctcttgtcaatttcagcaactgtttcagttaccaattggctagcagttaagtcaccagccactaatttggcatggatactttgtaaatcttcatataagtagttcacggctagtcttcctccttatccataatggcagggactttcaataagccgtccgctgaatctggtgcattcttcattaaaatctcgcgatctgtgccagcttgagccacatcttcgcggacaatattttgaaggttattcacgtgggtcgtcactgggacacccgttgtatcaactttatttaattcatcagtcattttcatgatgtctgcaagttgttcagtaaattgttctaactcagcatcgctaaaagctagttttgaaagttctgcgacatgctgaacttgtgttttatcaatcatgagtaaacccctcttctaattctgtcacttttatccattctgattaattttaccatatattaacgtataagaaagtgacatcccttggaatttaccagtttttcctaatctttaccggtttcagcagatattgaaatatatttttactttctttttaaaagcgtaattgaatgttatgcaattcattagaaggcgatatgatttataagagtttatcatagataagcattcgtttaatattatatactgagtacagataataagttgttaataatgtacaagattatcattaacttatagatgagtgttataatatgaaaatcaatatctcggaacaccttgtagcagtagcagttttaagtttaatgggtggcattgtcttacaaagtacgaccgtttcagcagcgaccacttcggttggtgtaactatcactggtgtaacacctggaatggccgctaaagccaaagaagcagccgcagaacaagccgctttagaagaagcatggttacaaacagaaatcgatgacagcgaacctgtagaagttaccgaaacaattggcggtcaaacaactcactactgggaatcagcagatggctcacgaagcacaactgcccccgcagaagttcaagacgaaacagtagccgcaccggaagtagcacctgaacaatttgaagaaacagcagttgaagaagaccaaccagccgaaaacttcaaaccaatgcctaagaaacatgacatcgatcaaaaagcaattgctttcaaacaactcacaacagattgggctagcaatcaaatcatgtcatcattggaagacttaatcactaaggctttccaacttaacaaataacactcagtattagctaagcggcaagtatcgtaaccaagcgtccccagttttgagtagtttcaaaagcaacactcaatagtctgtcggtgtaacttacggatttacccatactagaagttactaaactatttagaattgtttttttcctattttaaacgtttataaccactccactgctaaaataatttcattaaagtttgatgagttcacccaaaattttgggtgaatttttttattgcttaatgatttttcaaaaataagtctaattttaatagacatttcacaacttatttcatgctcataaaagaacccaaacctactgatagaagcaacttaattgattatcgggctgtattatcggtatccagtctgaactcccttcatgtaattttcatttacggcagactctggctagcctgattacagcagaacacctcaataggtgttatactcttaataacatctttttaaaaggagtctatcatgaaaaaatcagtccgtttaagcaatgccgtccacctgatgaccctgattgctttaaacccgtttgataacctttctagtcagcgcattgctaaaagcatcaatactaacccctcttttattcgccaaatcatggggcaacttaagacagctggcctattgacgagcgttaagggccatgccgaacccaaactaacgaaagctcctgaccaaatttcgctctgtgatatctataaagccgtcgatgatacccggttattgaacatcgatacccaaattgatcctagttgcggccccggacaaaatattcaattatcgcttgctacctattacgatcaaatccaagaaactgctgaacagcaaatgcaagccatcaaactagccgacattatcgaacaatatcaacaacgtctcgttgaaaatccagaattaaaactttacgaaaactaacacacaaaaaggttgggcaaattgcccaacctttttgtgtgttaatcctcagcggatacccggctgatgccgcactcttttcttttaaacgtgctctatcagccaaccgcttccggttaaccctgaatggcaaacaatcgctaacccggttattcaccattctgtgttaatcctcagcggatatccggctgatgccgcactcttttagatttgctagtacctttactaagtcatacttaactgcaataccgcggtccgttaattcacgtggcacaatcgcatctttgggattaacggtgatatatgttgcttgtggattttggtacgtcagattcataaacggttccttaataaacatcggtgtcatcatacccacacctagttctaagtagaccgtttttttaccttcagctttttgaataaattgacgatactttgcgtattgcttgttgtagtgttgtccttcaaggaattcataaccacggacccattccaacatttcagcaccacatttagggcaccgcggaattaagttttcgggtaaatggccattttcaatttgcggaaataattggtcaacaactgtctgattaggatagacttaatcatgacatttatctgcacattgaaaataggaccagtcaccctgaatcgtggcgacatctttatctggaaaagctttcgagaattgcacgtcttgattcgtcgttatcaaatcatagtctttatcctttaaaatggctttcaagtcctgatacggttggtaaactggttcatgtaaaacaaaatgaattaaagacagcttaaagccccataaatcgccgggattgtaccaatcgggaccagccgcagccgacatgccggctgcggctcccacgatgacgtaatctgcctctttgagcgtcgttgccattttttgtagtgttgcttgatagtctaaattagtcatttttgaggagctccttaaaatgatcatcgattgatccagcaagaccgattgaccattgttcaatggctgcgggaatattgatttcgtgcggtaaattcaacgtgatgtaacggtaacttagactttgcgccaccaattgcatgaggagtgccttaattaactgattattagcaccaattcctaattccagaatcaccacgttttgtgaacgatacttttgaacaaatgcgttaaacttagcttgttgcttttgaatcatcggcattggattttgattgttaccaaaattaccttccacttcaaaaatccgttcttcgtcaaatccactcagttgaaaatgcatgttgccatttgatgtgacaacaaagtattcatgaccgcccaccaactgctttaaatcgcgaaagacaggtgtactttcatagtgatcaaccatataatcgaacaatactttgtaaaatgcatctctttcagccactgttggatagttgtaaaaagccccttgaagaatattcataatcccgtagcgttcataaaaagtcccaaagtgggtcataaacgcttcgtcgtgtgcaaaaatattgtaaccttccgtaattgatagcccattaccagcactaataatgacggcatccgcattgtctagccaattccgtgctgttttaaactcgttcatgatgctctcatttggtgtaataaataaaataacaacaatatcgcatattgtacactgttatttttaaaattacaaccactgacttttaaaggtccaaaaaaatagcgtcgacaactgcgttagttgtcgacgctatttttttgcctatcagtcataactgactgttgtcgcactctttaattaataactcccgaatacgtgggttgagaaccttttactgccggctgctcggcctacgtaagcttgcatcccctctgcagacgagattgaaatatctaatggaatattttgtggtaaatatttatcagcagcggttgcaatgtattgtgtgaaactcatgatttctgtttcactgtagaattgtgtattaacggtgatgttcatcccagccaatacaccatcttcatagtgtgcttgagccgtgacaccactcaagttcgggaagaaagtttggacttgttctttaaaactagtaaacgcgtccgcatcactttgattgaccgctttttcatcattaacgagtgggaaaacttggttggcttggttcattttgtgccatgaatcaatcgttgtactaccgtttttgctgaccccataagcgaagaaggttccgcccactaaactatccttaggtgcttgtttgtaaagccccaccacgatggttgtcttactcaaaccttttttctgccgtaaacgcgttaagaccttattggccatttgtttaccttgttgcgccatcatggcactagaaattttggtttcaaaagtagcaccatattgttccttggtatagtaatccacttgattcatcccaagaccaatactcatcccttcaagcgcaccatctgcccctaagaagtcttgttctaagatttgttggagatacagtggattccgcttatccggttctttttcaccattatcttctggatttaagccaagtgtattatcttttgattgacgtgccaaccatttttgcgcttccgccgttttgatggtttgaccttcttggtagaggtatttatcagtagggaattgttttttagaaatgtttaataagccactttccaaactcttcacatcaaatgccgtgttactttgttgtgtggttaatccacgtgtctgacttgtcttgtattggttattatcaataaccccttcatacatgctgtcagtcactttcccggtcgtttgtagctttttagtcgacttagttgatgatgacgaactcgaattgctttgtaaacttgtacaacctgccaacaataaaaccgttgcggctgcaactacccataatttatactttgccactgaaaatggcctccttataagtcctaattgattcgcttattgcgccaaataactatctaggtctgcttcgttgataattggaatctccaatgcttgcgccttggttaatttactgccggcatcttctccagcaatcaaaatatctgtttttttcgaaactgagccggtcactttagcgccgttatcttcaagttgttgtttcaactcaccgcgggtatattgcgatagtttaccggtcaagacaaccgtttttccgttaaagtaactatcactattttcagcttgtgcctttgtcaccccagtataggtcaggttgacttgcacttcagccaattcacgaattaaagtgtgtacttgatcatcagcaaaataagtcgctaagctatccgcaatcgtctcgccaatcgtatcaaccgacataatttcttcttgatcactggccatcaaagcctccatcgtcaagaaatgttccgctaataaacgggctgctttggcaccaacatggcgaatccctaatccaaataataacctttctagcgaattctggcgactagcttcaattgcatttaacaaattattaatagatttttctttaaacttatccagttgcgcaagttgatcggccgttaagcggtataaatcggcaacatcatggaccaatccttgatccaataattgggcaataatccgtggacctaagccgtcaatattcatcgcatttctggaagcaaaatgcgttaactgttccttcacttgtgccggacacattgggttaatacaccgcaatgcaacttcttcatccaaatgaaccaattcatgaccacacgaaggacattctgtcggaatcacatacggttgactgtcagccggccgtttagccagtactacttgtgaaatttctggaatgatgtcgcccgctttgtgtaataaaaccgtgtccaacaaacggacatctttatcacgtaacatatcagcgttatgcaatgaggcgcgcgcgactgttgtaccagccaactggacaggatccatcacagcggttggcgtgacaacccctgtccgaccaattgtccattcgatgtcacgaacaatggttgccgcttcttcaggcgagaatttataagcaatctcccaccgtggcactttaaccgtattaccgagttggcgttgtaaagctaagtcgttaacttttaacacaaccccatcgatgccgtattctaagtcatcccgcgttgcttgatagcgctcgataaaggtctttacctctgtcatattatgacaaacttcagcggttggattgacgttaaagccgagttctgcaagcacttcaagcgcttcgtgctgggttgtcgcttgcacatcgtcaaaggtgacaatcgtgtacataaaggcactcaaatttcgctcagccgctattttggcatctaattgccgtaaactaccagcagccgcattccgcgggtttgcaaatggcggttggccttctgcttcccgtttttcatttaatgccgcaaaagaggctttgggcatgtaacattcaccacggacctcaatagagactggcttggttaatgtttgcggaatcgccttgatggtcttaagattctgggtaatgtcctccccaatcgtcccattgcctcgcgtcgcaccacggacaaattgccctttttcatagatcaagtcaatcgcgagtccatcaatttttaattcgacattatattcgatggcatgctcaacgtttttttgaagtcgattatcaaaagtcgcgagttcttcctcagaaaaaacatcgcccattgataacatcggtacttcatgcgtcactttcttaaagccaggcagaacttgatcaccgactttttgagtgggcgagtcattagtaacaatgattggaaaggccgcttctaacgtttctaagtcgcgatacaattcatcgtacacgtgatcttcaaccactggggcgtcctttgtgtaataggcttcgctgtattcagctaatgtctggcggagttcttgggccgccgctgccgcttcagtttgcgtatattgatcgatcggtttagctaatcccataatgaagactcctcactgtttatgatttgaaacgtgctttttaaagctgactcttgtgcttagcttcgtattgcaaacgaccgactttgtcggtcattcacaacactgtgctaatgctcagagtcaaatccgctttaaacacactctgttttgaaacgtgctttttggttgcaacaacttccgcttagcgctactcgtcaaacaactgcttgcagcagttattcgccgagttgtgctaatcctcagaagataaccgtcggaaacgcactctattctactttttcaattggtgcgaagcttgctagtagtcttttaacgccttgttctttgaaggcgatatctagttcttggtcgttgccggtcccgttgaccttgacaactgtgccaatgccccacttcttgtgttggactttttggccggctgtccaagcaccgctgttatcgccaccagttgtgtcggcaatcttgtgactcgtcgttgttttatttgcattatacgttgtagccgttgcgcgtgcataacgattgctcttaccaaatggcacattgcgttctggaatactgccagcattgccatttgcgtaatccaataatttatcatcgatttcgccgacaaatcgggacgcttggttactttgttgacggccgtataacatccgtgaataagcgttggttaagtacaatttgctttcagcacgggtaatcccaacatatgccaaacggcgttcttcttccagttcgtcttcttctaataaagcacgtgatagtgggaagatgccttcttccatccccatcaagaaaacaactgggaattcaagtcctttagcagcatgcaaggtcatcatggtcacttcactggcttcttcttcgactgaatctaaatcagagaccaatgataattcggctaagaagtccacaaataaatcactgtcatcttcttctggttcataatgttcgtcgaattgtttggtaactgagagtaattcttcaatattttctaaacgactttgcgcttcgagggtgttttcaacttcgagcgcttttttgtagccagtcttatccaataattgttccgttaattccgtcacgtttaaaaattcgcgcatcttcgctaagtcaccaatgacgttgccaaaatcgatcaacgtcttgcgactcttacctggaatggttgagagttccgcattttgcgctgcttcaagtaatgaccattgatgatcatccgcgaattgcgttaatttttcgagagtgccggggccaattccccgtttcggactgttaacaacccgttcaaaactcattgaatcagacgcattcacgactaggcgtaagtaagccaagatatccttgatttctttacgatcgtagaacttatgcccgccgaccatcttgtatggcatgttggctttgacaaacgcttcttcaattgaccgtgattgggcatttgtccggtataaaacggcaaagtcgccgaatttacgttggttcttttgcatttcttcttggatcttcgtaatgacaaagagtgcttcgtcacgttcactttgaccccgataataagtaattggttgtccttcgttattttcagtccacaattccttaggtttacgatattgattattgttaatcacaccgttggctgcttctagaatcgttttggttgaacggtaattttgttccaacatcactgatttagcatctggataatcatgttcgaagttcatgatgttgtccatgttagcgccccgccaaccataaatactctgatcggcatccccaacaacacagagattcttgtatttatcagctaacatgttaaccaatgtgtattgcgcttcattggtatcttggtattcatcaacgtggatgtattggaatttttcttgatagtgttcaagcgttggtttgttttctttaaataagcggatcgtttgcatgattaaatcatcgaaatcgagcgcttgattttgttggagtcgtttttgatattcggtgtagcattgggccacaattttttcgaatggtccgtttgctagacccgcatagtcgcttggtgtttggagttcatttttggcgttactaatcgtgcctaaaatcgcctttggttcaaacttcttcgtgtcgatgtttaaatcccgacaaacatggcgcattaacgtcaattgttcagaaggatccgcgattgtaaacgcgcgattgtagccaatttgttcaatctcccgacgtaaaatccgcacacaaagggcatggaaggtagatacccaaacatcttgagccccttcgccgagtaagttaccgacccgttcacgcatttcacgcgccgctttattcgtaaacgtaatcgccagcacgcgccatggtaaaacgtgcttttcttcaattaaataagcgacccgatgcgttaacacccgggtcttcccactaccagcacccgccatgattaaaagtgggccttctgttgtgaggaccgcttcagcttgcttatcgttcatcccttgtaacaattctttttcagacaaattagtcatccttccgtaaatgcaatcagcctatattataccaaactagataggtagaaaaaagcgaacacgacctagtaaaacggattctaatttttcgcaatcttctgccttgacctgggacgcgtttcataaattatactcaccttaatccaagaaaggtggtatgcatcatgattaaatacattttttctaacttagacggtacattgttaaaccaagacggacagctttctgaaaaagatattgcggctgtcaaagcaagcccactcccaatttccttgatttctgcgcgttcaccacaagaaatgcaagctacgattgatcagttagcgttaacgacaccccaagtcgcttttaacggggggttaatttatcaaccgacagatcttttcccaatggttttagcagaatatccacttgcaacctctgctgtcgcaacattaattgccgcattacaatctgaatttagtgacatcagtttaagtgcgtatgacttacaccactggtacacgcagacaattgacgctagtattgaggtaatcgctaagcaaaccggtcaattgccgacgctcatcaattttagtgatcaattgcaaaatccatttctcaagcttttcaaaattcaactgattatgcaaacgacacaacaacgggcaactgttgctgatttcatcaaccaatgccacttgcctggtctttcagtacaacaatcaggtacaatgaccttagaaattacgagtcatgaagccactaaagctaacgcattaaccaccatcttagaaaacactggactaacagtcgctgattgcgccgcgtttggtgaaggtcaaaacgacttagccatgttatcgctagttggccaccccatcgtcatgggcaatgccagtgatcaaatccagatggcgggtcaattcattacgaagactaatcatcacagtggcttcagctatggtctaaagaaatacattactaaagttaatcaaaaagtaggttaggattatgccaacaattcgtgatattgcccgcaaaagcggctattcggtttcgaccgtctcccgtgtgttaaatcatcaaaaatacgtctctgaacctgccaaaacggcaatcgaagcggtcattaaacaactcgattacgtgcctaatagcttagcgcgcgatttaagcttcggtcaaaataaaaatattggggtcgtcctaccgcacaatgaccatccgtatttcaaccaactcttaaacgggattatggatgccgcgttttcaagcggctatcacgttgtgctcctaccttccgaatataatcaagcagtcgaactagattatctcgaacaattaaaacgtaagaattttaccgcactcatttttacttcacatggtattgcactctcagtcttagcagagtacacgcgttatggtcaaattgtctgttgtgaagacccggggacccatcatatctcggccgtttattctcaccgtgagcccgcctatttagcggcattcaagtaccttaaagcccacaaagcacagcaaattggtctactattaagtcgtaatttagcgcaaagcccgacctggattgccgtcacgaacgcttatcaacaagttttcaactgccaacctgattccgagttaatggtcggtggcatgcgttcatttgaagatggctatcgtgccgctgaacaactggttgaaaagcagccaaccctcgcttgctattttacaaatggcgacgacattgccgctggtgtccgccaatatcatctgaatcatcaactgccgaccccgcttttaattggtcaagaaaaacaattatccagttttttattgcaactgccaacaattgaccatcacttcttcaccctagggcaaaaagcgtttgaagtcgccctcagtaaccatcaccaagtttgtcgtttcgaatcagaatttattttgccataaaaaaagccaccttaacctaacttttaggctaaggtggctttttatgtcggatgcttatgcaaacacccgatcaaaaattgtttgaacttgttttaagtgccattggtaatcaaaggcgtcgtctaaatcggcttttgaaagttcactcgtcactttcggatcggcttctaataattggcggaaatctttttgttcatcccatgctaaggctgtcttcggttggaccaaatcataggctgcttcacggctcagacccgcatccactaacttcaacaagacacgttggctgtaaattaaaccatgggtgatgttcatgtcagccttcatcttttcagggaagaccgtcaacgtcttcacaatccgcgtgaagcgattcaagatgtagtccaataaaatcgtagtatcgggtaaaataatccgttcagctgagctatgtgagatatcgcgttcgtgccataatgacacatcttccatcccggtaatcacatgaccgcgaatcacacgggctaagccactaacgttttcagaactaattggattgcgtttatgcggcatcgctgatgaacctttttgacctttagcaaagaattcttccacttcgcggacttctgttcgttgtaaatgccggatttcagtcgcaaaatgttcgattgaggtcgccacgaccgccatcgtgttaatgtaatcagcatgtagatctcgtgggagcacttgcgttgaaatatcttgggcccggatccctaagtgttctgtcacataggcttcaatttcaggcggaatattggcgaaagtcccaactgcaccactgattttaccggcttcaacgccttttgctgcgcgttcaaaacggtcttgattgcgtttcatttcagcataccaggttgctagttttaacccaaacgtcgttggttcagcatgcacgccatgcgtccgcccaatcatcacggtattttggtattcgtaagctttatcttttagaacagccataaaattggcgatatcagcccggattaaatcgttcgcttgtttcaaaatatacccttgtgctgtatcaacaacgtccgttgaagttagaccatagtggacccactttttttcatccgctaaggattctgaaacggcacgggtgaatgcgaccacatcatggtgtgtgatggcttctaagcgattgacttctgccaaatcaaagctagcattcgcgcgaattttctgcgcatcctctgtgggaatatcgcctaattttgcccacgcttcgacagctagaatttcaacttccaaccaagcttgataccgattttccgttgtccaaatggcgcccatttcgggacgtgtataacgttctaacataaacttctcctccaaatactacctaaatgctggtgatggtaaaacgtgctttttgtggcatctttctgtgcttaaccaaatttgccaaattcgcgattgcatcaccaactcgtcaaatccagttaatgctcaaaagataaccgccacaaatgcactctgttttgaaacgtgctccatcgggcatctttctgcggctagctacgtccgtccaacgatcgactgcgtcgctcattcgccggcctatgctagtcctcaaaagataaccgcccgctgtcgcactctaatataagtctgccgcttcgtaattatcgattaagggttggatggcttgtccggttgctgtgaccgatccaatctgttgattggtcgtgacgttgtgcaaattaaagtaccaatccggtttgatcttcatctgtgtttgaattaatgaccgttgtgcttcttgaatccctaaggtcatccccgcattattgaggcgtgatgggccgactgccaactgacagatggccttcaaatgatattcatattgcgagaaattcaaggtatgtgtcaagacatcgcccgttgcgtgcggtgttggcataattcgtttcacataaatattcatagcgggtgttaaaaagaattcaaccccaaaaacacctgtatagtctaatttttccccaattaagtgggctaatcgattaatttcagtcgcaacatcttgattaatccgtgctggcacaagcgacattttcaagcgatgatcttcaaactcattttcgatgactggcagtgtcacacacttaccatcttcagttttaacgaccatcactgatagttcttgtgcgtcgggaatccaagattccaaaatataagtccccaactcaagggcagcttcaatgttttcaaggtcactcggttgttgaataaaacgttgatactgcttaccgtaacctttttgaatgggttttaagatacatggatatccgattgaatcgattgcatcttgaatatcatctacatcaacaactgtcgcatagggcggaatattgatatttaaatcactcaaaaagactttttcgaggtaccgatcttgcgtcacagacaacacattactgccttgaggtagataataatgttgtgccagttgttcgagcactgtctcatctaataattcattcgtataggtcaacacttgactgacttcaccgagttggactaatgtttgataatcattgaattcaccatcgatctgactatcaattaaacgtgcaaatgaggtattttgcatctgcggggtcacaatcgcggctacccgataccccatttcttttgctttgagcgccaacatataggcccgttgatcatttccaataattccgatggtttgtcctggataaataactggcatcatattacctgctttcctgttcaccaaactgtatacccttattatagcgaatttaagcgttgtctgcctaatactttcctccatgataacaaatttttagacaaaaaaagagtgcctctcagcactccgttaaataacatttatttattttcgtctaaaaagacgacttgaccgtcttcaaacgctgcaattcgtgctaaagattccacttgaatgccacgttgatctaacaattcgcgccctttttggaaagtcttttcgatgacaatcccgacaccttcaagttgtgcgccggcttcttcaataatagaaagtaagccttcaaccgcttgcccgttggctaagaaatcatcaatcactaaaacgcgatcgtctgcattcagaaacttcttcgaaattgaaatgtggttattcactttcttcgtatacgaataaaccgttgcactgtacatgttatcttgtaacgtcaaactcttgtgctttcttgcaaaaacaatgggaacgtggaatgctaagcccgcgaaaacagcgggcgcaatgccagatgattcaaccgttaggattttagtaatcttcttatccttaaataagcgttggaattcttcacccattgcagccattaaatctggatccacttggtgatttaagaagttatcgaccttcaatacgtcttgacctaatacttgaccatcttttttaatgcgttcctctaatagtcgcacgctgagctctcctttgtagcatcgttaaacatcactactgatagtagtaacgactaataatgttttctgaaattgaattaaaaatagattaccacaaaaaaagcaacacaacaagctcaaatccagttattcagcgattggaaaagagcctgtcacaaaccggaatttgtggcaatctcttttgagattaattagtagcagatttcccatgatttgtttcatagcattctttattgatcatattggtcgaggtggtaagccttaacgagctcaattaacttcgctggataatcagggtcagtcgcatagccgtcttgttgtaaagcatgggcagcttgctcataattagtggccgcgattacgtgtgcatactgcgtccggttccaagaggtcccataagcaaacaattgtacatggtcaagcatcgattcttgataattgttatatactctaaaacgcgctgttgtcgttacccactgaccatttaaatattccttggtcgtcatttccttggtgttggcctcattatcacccttaataccgaaataattatggtagtgcgtagcaagtgagctcttcccccaatcactttctaaaatagcttgcgctaaagtaatacttggtaaaacatgatatttcgtctgtaattcttgggcatatggcaccatttttttaataaacgcttgcttcttagcttggcgcgattgttgttcctgtctggcttgatcggcaagttcttcttgggccttttgtccattataccgaactaataaaacgagcccaattccgagaataaatagactcactaaaacgaccactagccaatcggttgggtggcgtctcttcttagagtagtagttagctgttggtttgcgttttgtcgtcttgcgtttacgtttttttgccaatcctctgcctcaactttatctgaatctattctatattgtacacaaattcattcagaacaccaatctttaatttgtaacccccctttaatttctatttagcgcttttattgctataatattggctgtaaccgattacgatagtaaaggactgattttattgacaacgcttaactggggaattatcggcttaggcaatatcgccaatagtttcgcaacttattttaaccaacctgatggtcacatttatggggctgcttctcgttcactcgataaggcacaagcctttgccgaccaatacaatattccacatgcattcggtagttatgccgacatgctcggtgatgacaacatcgacatcgtctacattgcaaccccccacaattatcacttcgaaagcattatggcgagtcttgaagccggtaaacacgtcttctgtgaaaaagcgattacgatgaaccgccgcgaactcaatgcagcaaaggctcttgctaacgaaaagcacttgatattagctgaagcaatgaccatttatcacatgccattgtttgctgagattgaacgccaacaagtcgctaatcacttaggcgctttaaaatcaattcaagtctcttttggaagttataaagagcttgatccaaacaatcgcttcttcagtcccgcacttgccggcggtgcaatgcttgatattggtgtttatgccctctcatttgcacgtcggatgttaactgctaaaccagaacttgtagcgacgcaatgggtgccatcagaatccggtgttgatcagcaatcaacattacttttaaataatgccaagcatgaaatggtgactgttaccttaaacattcatgcgaagatgcctaaacaaggtgttctcgtttatgaaaatggctatgtcaccgttgacgattatccacggcctgacaaagccaccctcactttcccagatggtcgcgttgagaccattcaagcgggtgacgcaaccaacgcaatgaactatgaactccatgatttccaagaaacagtgcgcggaaatcaatcaaacgataccctcgaattatcaagcgatgtcatggacatcatgtcagacgcacgtgctgaatggggctttgtctatccatttgaaaaacgcactgatctcgattaatccattcaaaaaacctggccaatttggtcaggtttttttagagtattttagcgagaaccaccatatcttttaggcgaatcccattttcatagattggcgtttgatattggtcgaagaagtttttgcgaatttgttcgaaccgaaagccttgacgcaaataaaaaccaattgctgccaaactgccgtccccagtgccaactagcaatgattgaaacccttggtcaattgcaatcgtctgaatttgagtcatcatttgcccaccgaatcctcgatgctgccattctggccgtaccgcaatatttttaagttctacctgctgattgttgagtgccatcagatggaagaccccgatgacttgctgctgatcgcttacggtgtaaaattgcccatgcatcaaatagcgttcaatcatgccgacttcttcatccgctaacaatagatcatccagccactgtcgccgtgctgcgccctcaatcaattgatacgttaacatctccagctcaccacccaatcaaaaaaaggggtcgcgacaaaattgcttttgccgcgacccctaggttaatttttaaattagtttttgtttacgttaacagcttgtgggccgcggtcgctttcttcgatatcgaaagaaacgctttgaccttcttcaagagtcttgtagccttcaccttggatagctgagaaatgtacgaatacatcactaccatcttcgcgagttacaaagccgtaacctttttctgcgttaaaccattttacagttccgttttccatgagaaaaatcctccttgtgtcgatgacacattataaatttgtgtatttctggtggtccgatggaagaaagttcttttggaaacattcgtaccgcaaccattcaaaaagtacaaacatagtgtaacacaggcaacaaccattggcaaccatttggcaataaaaataaaccgttttctatcacggacaatcagcatccgtgtttttagacaagtgttattttatatgttgaatcatgccccaaatgatttggctttttgctttaattacgttaagatagcagtataactttttctcattggagtgcttgcttatgctaaaactattgaaacggctattaccaattatcttcatcggggtaagcctagccgcttgccaaaaaccgatggatactaaacatcaactccaatccgatatgcaaaccgttgaagatgcgactaagcaacaacgaacagctctttcaaccctcgaaacaatcggcgatccagttcctgataactatctcacgattcaaaaaaaatatcccgacgaaaatctattaacgattgaagatactaagattgcgacgactgcggccaagcgcgaagcagcctttcaaagtcttaaagaacaacaagctgtgctcaaaccggtcattaaacgcctcaccaaactggtcaagcaagaaaacgatgaattgccgattgaacaagtcaaagatttaaatcaaagtcttaagatttcgacacttgattatacaaccttggccaccttctacaacgcggccactaaagcatctgatgaattttacagcgaccatacagatgctgatgcagacgaagacagtcttaaatcaccaatcaatcgtttaaatcaatattacagttcagtttatcaacaagccgaaattgctaaggtcaacatgaacacagttgctgcgcatgctaagaaagtgcaaaaacaactggaataaacaaaaaaggagttggacaaagtcacgtttgtccaactccttttttcaatctttaattattcaacccgtggcggaccacaatcgtcggctgtagctacccgcacttgttattgcgtccgtttaaaccgcatgagtggtgttgcgactagtggtgtcaccacagctgctaaggttgcttccattacagcatttaacgcaacaacgccaagcatcacgatgattaaatgggtcggatcagtatgatacatccctgccgcttggtgtccgtaaagcacacgcgttaagccaatcactaaaatggtattgattaaagccccgaaaatcccagctaaagccattgcaccggttttacgaattttagtttgatataagtgttggaacgtaaagccagcaatcatcccagccatcaaccgcggtaaaatagcgataattggattttgaaagattaaaagtgaaagcggatcgcctggagaggtataggctctaaataatgaaatcaaaccccaaattaatcctagaatcgccccttggcgtgtgcccaggatcacggccccaataatgaccgttaaatgaattgttgttacggctggtagcccaggaatgatattaatataaccgaccatcggaataaaactttgaatgattaaaaaagcggttaaaatcgccataatactaatcgtataagctgatgaatttttatgtgtcatcctaactgactcctaaactgaatttattgctcattatagcgatttgtcaccctagtttcaatcatttacatcaagggacaaaaaaaggtaattccaattggaattacctaactgaattatgatgcgggtgagaagactcgaacttccaccgggaaaattcccgacaagatccttaatcttgcgcgtctgccattccgccacacccgcgtaacttgctttatcactttaagccacgtacattagtataagagaaacgatgattgaagtcaattaaaattttactttggagacgattacatgcccattatccccgctaaactaaccgatattgccaaattaaccaccctgtatcaacaattaacgactgaaatgcatgtgctacaacccactaattaccaagctgattacacgcctgagttctttgactggcaacaaatgataactgatccactacaagcagtctttgttcatcaaaaccaagatgcgcaaatcgatgccttttgtcacgttacaacagtccaaacaagtccctcacccttgtttatcgcacaccgctttgcttatctcacaacactgtatgttgcaccagaggcacgccgccaccacgtcgctacacaactgctatcgtccgcaaagcaatggcaacaaacacaagcgctcgattatttagaactaaccgtgttagggaataatccggctgcgttggccctctatcagaagctgggctacaccactcagaatcaaactttacgcgccaactaaaaaaaggccacccctaaacataggggtggccttttttcattgaatttgtgtggtttgataaatcagtcgtccatgacaccgccgacaaacatagcgagccgtattcattcgacggcgacgtggatagacttgcccacagtctgaacatttataaatcacaattttgctcgatttagctgtcttttgtgcagctggtgcatagcgcgcacccccgacttgtgcaagtaattgtttaaactctgcgtctcgatgacggtaaccgcgatgcaacagatgcaggtgataatggcaaagctcatgcttaatcaccccttctaaggtctgtgtatcatgttcggtcaacatctttggattgatatcgatatgatgatcctgtaaatgatagcgcccgccggttgtttttaaacgccgattgaaatttgcttgatgcacaaacggccgattaaaaaactgcaacgataaccgttcaatcaattcagttaaggcttgatcagtcatttgcctttggcgctttcattgtcagttgtacgcgttcacgttcttgatcaacactcatcacccaaacctgaacgacgtcgccaactgccacttcatcagaaggatgtttaacaaagtggtttgccagttgagaaatgtgcactaagccatcgtgtttcacaccaatatcgacaaaggccccaaaatcaatcacgttgcggactgtaccttctaacgccatattcggtttcaaatccgccaaggttaagacatcatgacgtaacaatggcgccgtcatctgatcccgtaaatcacgccctggtttttgcaaactacttaagatgtcggtgattgtttcaatcccgacctctaattcagccgctagagccggtacttgcatttgtgcaatcgccgtcttcaacgcatcgcttcctaaagcatcaacggttaacccaaatgatttcaaaatggctttagccgttggataactttctggatgaatatcagtattatcgagtggattgtccccattaataatccgcaagaatccgaccgattgttcataagctttaggccctaagcgtggtactttcttcaaagcactccgcttttgataaaggccgttttcattgcgatattgcacaatgttttgagcagtagttgctgacaaccctgagatatgttgtagcagctgagggctagccgtattcaggttgactcccacactattcacgacatcctcaatcactgtatcgagttgcacagtgagctctttttgcgccacatcgtgttgatattgtccaacccccactgcttgtggatcaatcttgatcaattcagctaacggatcttgcaaacgacgggcaatactaatcgcacttcgttcttcaacgtgtaaatctggaaactctgcccgtgctgcatcactcgcagaataaacagaagcccccgcttcattgacaatcacatagaaaatttcccgggaaatagatttcaaacacgtcgttacgaattcttctgattcacgactcgcagtcccattaccgattgcaatcatttcaacttgatatttctcgagtaaagcagtgaattcatccgccgcttttgatcgtttatcagctgaagctggtttgtgtgggtaaatgactaacttatccaagaattttccagtgccatcgacaacggctaatttacacccagtccgataagcgggatcaaagcctaatacaactttacccttcaatggtggttgcaacaagagatgcttcaagttatcaccaaagacactaatcgcttgttgatcagctttttcctttaattgcttgcgtaattcacgctcaattgccggtccaataaaccgcttataggcatcttcaaccgcagacttgatgaccattgctgacgctgaatcttgtccatacaacagatcttggctgatccgactggcaattacttgatcgtcaatcataattttagctttcaaaataccttcgttttcaccacgattaatcgctaaatattgatgttccgctaccttcgttaaatcggcagtgaaatcataatagatttgataaacttgcttctcatcggctgcttcgtctttaacttgactggccaactgaccattttgccaagtatattggcgcacccaattccgatattttgctgtttcactaatattttccgccaatatttcatgaacaccagctaaaacagcagctgtatcattgattttttgatctggattgaggtaagcttcagcttttgccaataatgcttgttcggttaagctaggtaaccctgcgataaactgcgcaaaaggttccaagccggcttctttagcgatggttgctttggtccgtcgtttttgtttatagggtaagtacagatcctctaaagcttgcagttgcgttgccgtttcaatttgttgtttgagttttggcgttaatttttcttgttcagcgatatttttcaaaatatcggttttacgtttttcgagcgtcgttaagtattgaaatgtgctttcaatttcacgaatttgaacttcatcgaggcttcccgttcgttcttttcgataccgcgcaacaaacggtacggtattgccttcttctaaaagacctaacgttgctttgatttgttgtggtcgatactgtgttaattgttgaatcacaagattttgaatatcaggcatctgattgcactccttttgcttcaattaaaaaaacagcccccgacttgggaactgtcaactttcgccctaagcgattcttgaaatattttggatgtatttagaaatccgttccgttgctttgtcttgattcatttctgaagctgcaaaagcttgcatatcaacggtttgatcatcatgcatgcttgtaattaaatcttcacagccttgaatgaaatcagcgtaagcaccgattaaacgttggttgttccccatcaaacgagcgggcgcaacaactgttttgaattgtgctaagaattcgtgatattgatcaacaccatctctgaagatttgtgctgtcttttgatagtcttgttcgctcatttcggctaacttaccatcagcaacggctgcttttaaaggggtgaaatacttactcatcccttcttgtactttttcagtattatcgattaaatcgttgacagcttggccgtatttggcaagcttttgttgcgttttattcatgtccatcctcctagtttcctatggtttagtatactaatttcccaatcggcttgcaattaaaatattaaagcatgtgtcattaatagaaaaggcatgcttagttcatcaaaggacatttacctcattaaaaaaacgctagcgacaaaatctcgtttgtcactagcgtcgattattacctatcttctcttcaacattctactcgtccacgactgaccaaacattaactttgtcaataagtcgatacaagcgaaaataactaaataaagtaagaaactcaacaaccaattattttgaacgtgagtaatccgttccagaccaccaaagatgaaaagtgatatcagaaactgtaagaatatttgcatacgtaatcctccctacaaaactcactaacataaaagttatttaatcacctttattatagtttaattgacaagcactttacaaggtcggcaacaaattatttagccattctccgctggaagaacttcacaatttccacaatcacaatcaatgagaatgaggctgctaggacaattccccattggtgaatatcgagatgtgacacgtggaataggccgtttaagccaggtaccataatcgttgcggctaacaggaggaatgaagctaagacagcccagttgaaagctttattcttgaaaaagccaactgtaaagattgattggtgcactgacttcacgttaaacgcgtggaagagttgaatcatccctaacgttgcataggccatcgttaacgcatcagcatgtgctaagccgctcgcttgatgcactgggtacgtaatcgctaaggcatacacaccaagcgtaatcccaccttctaagagaccttgatagataatcgcttggaagacaccgccggagaagaagtttgacttgcgcccacgtggtttttgattcataatccccggttcagtgggctcaacccccaacgcaatcgctgggaatgtatccgtcactaagttaatccataagatgtgcaccggttgcagaatttgccagcctaaaatcgtcatcatgaataaggtaaggacttcacctaagttagctgacaataaatattgaattgatttttgaatgttggcaaagactttacgaccttctttaacagccacgacaatcgttgagaagttatcatcggcaagcaccatatcactggcgccttttgatacttctgtcccggtaatccccatcccaatcccgatatctgcggacttcaaggctggcgcatcattgacaccatccccggtcatcgcaacgactttaccatgtttttgccaagctttaacaatccgcaccttatgttctggcgcaactcgcgcataaactgcgtactgactgacttttttagcaaatgtctcgtcatccatttgatccagttcggcacctgtcacaacggccgcatccgcatcttgttcaggtgtaataatccctaaacgaagtgcgatggcttctgcagtatcccggtgatcaccggtaatcattaacgtccgaatccctgctgaatgcgcatcagttacagcttgtttggcttctggtcgttctggatcaatcatcccgactaaaccagcaaagattaactcatcttcaatcgtcggatcaattgttgctggtaagctatctaacggtttatacgctaatgccaagacacgtaacgcttgtttagctaaatcgtggtttgttttgagtaaaaattgccgttcatcttcatctaacggttgaacatcgccattggcatcaataaaatgactcacgcgtttgagtaattcatccggtgcacccttagtggtcattaataattgaccatctttggcttgatgaatcgttgtcatcagcttccgttctgaatcaaacggtacttcacccacgcgtggtgctgctgctagggcatcttggatcacgaaacctttatcacgcccataagcaattaaagccgtttccgttggatcaccaattaactggccatcctctgtgattttcgtatcgttggcaaggttcataatgcttaacgctaaatcatcgcctgccaagtcggctgatgcttcttgcaactgattattggtaaaaatcttttctaccgtcatttgattcatcgttaacgtcccagttttatcggacgcaataatgtcggtactccccagtgtttccacagcaggtaacttccgtaccaacgcatttcgtttaaccatcttctgtgtcccaagggctaaaataaccgtcacaattgccggtaatccttctggaattgcggcaaccgctaatgagattgaggttaataacatattaattggtgattgcgcgtggcgtaagtagccgaccacaaatacaacagccgcaatgattaaaatcataatcgttaaactcttaccaagttgacttaaattcatttgcaatggtgttgtggtttcaccagcttgatttaacatcccagcaattttaccaacttcagtttgcatcccagtgcccgtcacaaccccgacaccacgaccgtaagtcacattactattcatgaatgccatgttggtccgatcgccaatcccactttcaggatcggttaacgttgcaacagtcttatcgaccggtaccgattcacccgtcaaagccgattcctcaatcttcaaagccgctgattctaacaagcgtaaatcagctgggacgatatcgcccgcttctaatagcacgatatcaccgacaaccagttcttcactcttgattttaacaatctgcccattacggcgtacatgtgcgtccggggttgccatctcttttaaagcatcaattgcttgttccgctttggcttcttggaaaacaccaaaaacggcattcaagataacaacggcgagaataataatcgcatctggccattcatgtgctaaaaagccggcaatcattgccgctactaataagacgataatcatgaaatctttgaactgttctaaaaaacgaacgaacaagctttttcgtttagtctcagtcaactgattacgcccgtatttagcgagtcgttcagcaacttggtcttgcgttagcccatcagttgttgtggctaaactttttaaagtctcatccgttgattgggtaaagaatgaacttggttgatctgtcattgtcgtgcctcctatagatagatttcggggtaaaaaaagagacctatagagaattcaaagaatcccccataagtctcactaattaagataacaccagaatattgccttgttggtggcgttatcgcagacaagctgccagttactcccttatcgttaaactcattataagacagaaccaatctaaaacgcaagtaaaacattattctgacgtccaattaatttagcggctaaacgaaatccagccgattaacgccaaaatgtatcaaaaacagtaattggtaaatgccgcttgtgcgctgtcttttggtaccacttttcaatcttggtagcagcctcttctgccacttcacgaccctctaaataatcatcaatttgattataagtgacaccgagtgctaattcatctggcaatgctgggcggtcttcttcaagatcggcggttggaatcttttcgtaaaggtgttttggtgcctttaattccgccagcatcgctttgccttgacgcttatctaatctgaaaatcggtacgagatcagcaccaccatcaccgaacttcgtatagaaaccggtaattgattcagcagaatgatccgtgcctaaaaccgcacccttcatttcaccagcgataccgtattgcgcaatcatccgcacacgtgccttgatattacctttattaaaatcactgactgtcacttctgttttcgccagtgcttgaaccattgcatccactgacgctttgatattcacacgccggacctgatccgcttgcatgaaatcaatggcagccattgcatccgattcgtctgcctgctcaccatatggtaatcgaacagcgatgaattgataggtttcatcacccgtttcagcacgcatctcacggaccgcttgttcagctaaagcaccgactaatgttgaatcttggccaccagaaatcccgaggacgtatgtttttaaaaatgtattcttttttaaataatcttttagaaaatcaactgaccgtcgaatttccgctttcggatcgattgtaggttgggtctttaaggctgcgataatttcagcttgtaaaggtctcatgattaaataccaccttttttaaatgttagattgctaacttttttgaaacgcgcttccttcaacagctttgtccggcaaataagcgctagcgcacttattcaccagacttcactatactcaaaagctaaccgttgaatgaaccactctgcttagagcgcactctgattttggacttcttctttgactcttctgatttgggccattttgtgatcccatgtgcgttgtgaaaggtcaactgggtaatcttgcgggttcaagtcccgcttgtattcatcccataacgagtcgagattttcactacagaacttcttaatcgcgccaagttcgggcaatttgtaaacgcgttgcccgtgttcaaaaatcgtccgtagaattggccgcgcattaaagtccgtcacagttttattaatgtacgtgtaatttggatggaacatatagattgaatcttgttccagtggatcttcatcccaaagcgtaatgtaatccccttcagatttaccatcaacttttttagtgattcgccaaacttgcttgcgccctggtgtggaaactttctcaacattacttgaaagcttgatggtatcgaccatcttcccgtcgccgttttcaatcgaaacaagcttatagacagcccctagcgcgggttgatcataagccgtaatcaatttcgtgccgacaccccaaacgtcaattttggcttcttgcatcttcaagttttggatggtcttttcatctaaatcatttgaagcgtaaactttagcatcggtaaaaccggcttcgtccaattgttggcgcacgcgttttgaaatataggccatgtcgccactatcaatccgcaccccttggaagttaatcttgctaccaaattcctgagcgacccgaatcgcacttggcacaccacttttgagagtgtcatacgtatccaccaagaaaacacaatcgtgatgcgtttcagcataagcgcggaatgcttcataatcattgcgatagacttgtacgagtgaatgcgcatgcgtcccactggctggaatcccaaaaatctttgaagcgcgtacgttacttgtagcgtcaaaaccgccgatataagctgcccgagtgccccataaggcagcgtccagttcttgggcacggcgcgtcccgaattccaaaacaggatccttaccgaccacagatttaatccgtgcagctttcgtggcgattagtgtttgataattaatgatgtttaacaaggccgtttcaattaactgacattgcgccaatggtccttcgatttgtaaaatcggttcattcccaaaaaccaattcgccctcaactgctgaacgaattgttaaatcaaaatcaagattggctaaataatcaagaaaatcagctggataccccacctcatcacgtagataagcgatgtcactttcggtgaagtgtaagttttctagataattcacgatgtgttctaaaccagcaaaaattgcgtaaccattttcgaatggtaattttctgaaataacattcaaaaactgctgtgcgattgtgcaagtcctttttaaagtaagtaagcatcatattcagctgatacaagtctgtatgcaacaaaagactgtcatcagggtataagtttggcatgttaagctcctaattagagatatatttggtataactatatcataaaataaaagaggcatacaaaaaaagacggtagaaaaccgtctttttttgtttgagactagaagaaacgccaaccccatttattaaaatactgtgccatggacttcaagaagatcttaaatcccttgaaactgcggtgggatgccattccataaaaatgagtgacaaccgcgtctggtacatataaaatcgtatgaccgctttggttaattcgatcacaaaggtcattatcttcgaaatacataaagaagcgttcatcgaaaccatcaatagcccgaatcacatcagtccgcgtaaacatgaacgcaccagatccatattgaatcacttgccgtcgattcgttaaatcccggcattcataagccgccaagcgcttttcaaatagcttcttaacccatttaaaaggtacaaagcgtagcatataatcgaagacatctagcttccgccgtactaaatgttgggtcgtaccatccggaccaacaatcttcggtgttagcatccctaagctatcattagcatcttgatccgctaaaatccgatacatctgttcaaatgcgttttgatttaaaataatatccggattgcaaatcagaaaataatcggatgccgtcagcttcaggttggcattatgcccatgaccgaacccaagattctcttggccttcaatgatttcaacatcatctgcagcataggcttttaattgcgccaaatactcaggtgttgagccattatcgtgaaccaatacttttaccgggtattgccccaagacagttgccttgatactatctaacgtcttaaagacgtattgactattataggtcacaatactaatcgtcaccgttttatccagattattactcatcatctcatcctaatcgatttttgccataaatttttgtaatgcatcttgccaggttggtacttcaaatccagttgctttgatcttcgttaaatccatgattgaatgtcttggacggaatgctttttgaggatattcgtctgatgttaccggactcacttctacgtctttatccttcaagatttcgattggctactaagtgggtaaaaaaaaccgttaaccaaccattagcaccctaaaaaaacctaggtcagacaaataatagttgtctgacctaggcttttaaagtgataatttaatcgtttgcgccacagtcttaggaataccgagtgcttcgagttccgccactgaagcttctttgatatgtttcatcgaaccaaaattcttcaagagtttcgtccgcgtcttaggaccaacccccttgatgtcatcgagtttagaactcaacgaattcttcccgcgtaattggcggtggaaactgatggcaaagcgatgcacttcgtcttgaattcgcgttaacaagtagaagccttggctctttggatccaactgaatggtttgatcaacttccccatataacaacgaggcggttttgtgatgattatccttgaccatccctgcaacgggaattgatagccctaattcgttctctaagacgtctttagccgcattgagctccacaattccaccatccattaaaatcaaatcaggcagtggtttatcctctttgagcaatcgcgaataccgccggaaaatgacttcccgcgtattggcatcttcgttggcgcctgcacgatctgtcgtttgcgttaacttatacttgcgatagagtttcttctcggcacgaccatcaacaaacgtgaccatcgctgagacaggatcagtcccttgaatatgcgaatgatcaaatgcttcaatgacgtggccatgtggtaagccaagcgcgtccataatctcatcttgcgccccaacggtcttgcggttgtcgagttccaataaacggaacttctcttccaacacaagccgactatttttctgcgccatttccatcaaagcttttttctcaccacgttgcggcgtgcgaatcggcacattcaaaatttcggtgaggactttcttttcgaccccttctggaaccagaatttcgcggggtaacacattattcttgcggttgtaccattgtaaaataaaggttgccaattcttcttcaggtgtgctgacacacgggaagagccgcttttcacgccgaatcaaccgtgcttggcggatgaagaagatttgaatcgataaccagcccttatccaaataaaaggcaaataaatcgcgcggggtattatcgttagaaataattttctgcttttcaacggtggcttcaatgtagtggagttgatcgcgcaattctgcggcgcgttcaaactgcatctcttcagcagccgtagtcatcttggccgtcagttcttttttaaccggatcaacttgcccattcaagaaacgtttaatctccttgatttgggccgcatagacactctcaggcacttctttgaaacacgcgcccaaacattgacccatatgataatacaaacagggccgcccttgatgtccctgacagcgtcgtaaaggataaacccgttgtaagaatcgcaatgtttcttgggcggcatacacgtccggataagggccaaaataaaagccgccatcttttttgacatcccccgtgatcagtaggcgcggatcgcgttcattcgtaattttaatgtaggggtagcctgtgccccgcttaagtttaatattaaagtaaggttggtgtttctggattaacgtaatttccaacaaaaaggcctctttatttgtcgatgtgatgattgtttcaaaatcgacaatttcagagaccaatttggccgtttttccttcgtgactactcttgaaatacgagcgcacgcggtttttaagattttttgctttacccacatagataatcttggcattgatatccttcatgatataacaaccaggtaatgcgggtaagagtgctaatttatgttcaatgtgttcgcttgccaaaaacaccactcctttaattcaaaacaagtgttcgtctttctattttacgtgtttttggctaaattgcaactattgtgctaggaccttggctaaaaattgttgcgtccgttcttcttgcggatggtcaaaaatggcttcggggtcccctttttcaacaatttgactatctgccatgaaccagacttcatccgccacttcgcgcgcaaaccccatttcgtgggtgacaacaaccattgtcatcccttcttgtgctaagtcttgcattaccttgaggacttcgccgaccatttctggatcgagcgcagatgtcggttcatcaaataacaatacgtcgggtgacatcgctaatgcccgcgcaattgcaatccgttgtttctgcccaccagagagttgatcactataagcatccgccttatccgctaaaccaacgcgttcaagcaacgcttttgctttagccgttgtttcggccgctgattctttcttcactttttgtggcgccaacattaagttatcgaggacagttaaattggggaaaaggttaaagttttggaaaaccatccccatctttgtccgaatctgatcaagctgtttttcagataacgtcatcaaatcggtgccttcaaacagaatttggccactcgttgggtcctctaaacggttcaagcaccgcaataacgtactcttacccccaccggaagggccgatgacaacaatcacttgaccagcttggacttcaccactaacaccatttaacacgaggttgtccccatattttttaaccaattgattaatcttaagcatgttgcatcttcctttccacatagttcaaaagtttcgagagactaaaggtcatgataaagtagatcaccatcgcaacaaaaatcggtgcaacgcctttataagttgctgattgaaccactttgagttgataaattaaatcagtgaccccgataatggaaacgattgaactttccttgattaaagaaatgaattcgttccctaaagcaggccagatattcttcagggcttgtggtaaaacaatgtaacgcattgtatcgcgttgtgacaagcctaaacttcttgaagcttcagtttgcccagcatcgatcgcattgatccctgaacggataatttcagcaacatacgccgcactatttaaggaaacggcaattacccctgccaaaagtgctggaatgttgacccataagccaatcccgaagtagacaaacatgatttgaatcatcaacggtgtgccccgaacaaattcgatatacatgactgccagcgcacgcaccaacttattcttggccaaacgcccaaaggctaggaggaccccaattaaaatcccaattgcaattgaaacaatcgtaatgaataatgtgtagccaatccctttagcgaagtatgcccaatagtgccacatgctagtgttgtgcgtattgaccttcatgagttggcccgcgttctttaagtattgcggaattaatttttgctttttaatttgcccgatactcttattagcagcagcgactaaggttggcgaatcctttggaaaggcaatcgctgatccttgcatgtctgcgcctaaatcaaatttcccattaatctgaacgagttctggatcattacttgcataggcggttgcgactggttcttccgccacaatcccgtcgattttatgactctttaatgcaaggacgagatctgggactttggccaagcccgtaatctgcgcatctttaatttgctttttagcgagtgtttgttggagactccccgtttggacccccatttttttcccgttaaaactatttttggagtggtaaatcttcgcatcagctttattgactaagattgattgaccaccgagataataaacatcagaaaaatcaacactcttgcttcgttcatccgttggtgacatcgccgaaataaccatatcgactttaccggtttccaaaccaaccaataacgcatcaaagtccatcgacttcaccactaacttaacgcctaaatcatcagctagcttctgtgcgacttgaatatccataccgacaatcttgttcttaccgtttttattcactaaaaattcataaggtgcataatcggggctggtccccaaaaccaacgtttttttagcttgcacttggctaaccgtctgtccagctgccaaaacgggctgctgctgaatcatgaaaaacgttaacattaccatgaatggtaacccaacaaaagtgagtaattttttaatcgtcatattatctcctcctctgattaggactatcatacaacaaattaaataattatgcaatatttatttataaaaagtgaatcattggcgaaaccgttattatctggtatgatagatgcaaattagaaaagagggattacgatgggcttaaaagtcactaacaagaccgatttaaccggtttattcgataaattcgcatcactaccagaagaacgccaaaaagttgaagcacaagttgaagaaacagctgataaattaaaaaaggtagatgcagaacaaaaagaaaagcattaaacaaagacagcaaaaaaggcggtaagacaaattcatttttgtcttaccgcctttttgctggtttaaacgtgcgtcatttgcaatcgcctttcggttaacgcgattgtacgctttattctgcgtgtctttctgggtagcgttgttttaattgttcaatgttttcgcgcgcgactttatcaaagtcgaggttattccattccgcaatttgtgataaataccaaagcacatcgccgattttcttagacatcattttttcatctagttcgtggccttggaacgcatattttttaacgatatcaaccacttcaccactttcacttgctaagcccaaagctaagttagttaacacttgttcgttaccatataacgttcggttggctaacttttgatagtcattaaattccattatgcttgtccccctattgcacattgcttttcaatccattcccaaactgtctctttaccagcaccagtcagtgcgctaaagcagacaaattgatcgactggattaaaatcaagcgcttctttgatgattttttcttgacgattccatttccccgttgagatcttatccatcttagtagcaaccactaaaacagggatatcataatacttcgcaaaaacgtacatcgcgatatcatcatcggttggttcgtgacggccgtcaattaatgaaataagcccctttagatttgagcggctggttaaataagcctcgataatttgcccaaacttctcacgttgcttctttgaaactttggcatacccataaccagggacatcgacaaagtaaagttcgttttcaacgcggtaaaagtttaaagtctgtgtcttacctggcttgctagatgtccgggcataactcttacgattgattaatttattaatcaatgaagacttaccgacattcgagcgaccagataacgcaatttcaggtaattgatcagttgggtactgcgaagcagctaccgcactcatcaccatttcaacatcatgtacttccataataacctccgattatttccttcgaatgttagtttagcataaataaataattattgcgccgttgacatctctctagtttcatggttaacatatcttcttaaccccgttaaatcgcgtcattgtaccgtttcaaaagtcccttaatgcaaaaaaactgccgcgacaaaatctaatttgtcccggcagtcttttaatttttatgacgcttcttgtccgtcagctaaaaagagttgtgggttggctgtgccatccaccgcttctttcgttacaacaactttagccacgtcttcacgacttggaatatcaaacatcatatccatcatgacttcttcaatgatcgaacgtaaaccacgggcccccgtgtttcgttcaatcgctagatgtgcaatcgcatggagtgcttctggtgtaaattctaattcaacattatccaaggccatcaacttgctgtattgcttaacgagcgcgttcttaggttcagttaaaatatgcaccaaatcatcttcagtcagtttttccaatgcagcggtaatcggaatccgaccaatgaattcaggaataatcccaaatttcattaaatcttccgttacaatttgttgcattaagctttgatcttcattggtagtttgaccattcttgcttccaaaaccaattgtcttttcacctaagcggtttttaacaatcgtttcgatgccgtcaaaggcgccaccaatgatgaataaaatattggtcgtatcaatttggattaactcttgttgtggatgcttgcgaccgccttgaggtggcacactagcaatcgttccttcaagaatcttcaagagggcttgttggaccccttcaccagagacatcacgcgtgatcgagacgttttcactcttcttggcaatcttgtcgatttcatcgatgtaaatgatcccgcgttcagcacgatcaacatcgaagtctgcattttgcaacagcttcaagaggatattttcaacatcttcacccacgtaacccgcttcagttaaagtcgtggcatctgcaatcgcaaatggcacatttaaaatccgcgctaaggtttgcgcaaggaatgtcttcccggaaccagttggtccaattaacgcaatattactcttttgtaattcagtatcgccttcttcggccactgacatttggttgacccgcttgtaatggttgtagactgcgacagataaagcttttttcgcttctgtttgaccaatcacataatcatttaaaatggctaaaatttcttttggctttggcacttctagtaaatcactgaaggcctcatctttaaactcttcatcaataatctctttgcaaaggtcgatacattcgttacagatataaacaccagggccagccacgatctttttcacttgatcttgcgacttcccacaaaacgaacacgttacgggtccgttagttgtttctgtatcatctagcatactgggattctcccctttctcgatatacgcttaccgctgtgagtcgttaaaatacacccctacaacgtaattcagactatagcataactatggtctagaataaagtaaagttactcgcacaccgtcaatgacacaaaagcgggtccaaagtaaacaccttgaacccgctttttagcatcatttaaagcttggattgatcagacgaccttatttagcgtctttcacttctacagctgaatcagcaatgatttcgattgctttcttaacaccgatatcatgttttaacatgtcatctgataagacgctacgaacagcagcttcttccatattgtattgttcagctaaactcttaagttctgcagcaacttcttcgtctgttgcttcgatgttttcagcttccacaacggcttcaagtacaagacttgtcttaacgcgtttgtcagcatcaccagcgaattgtttcttcaaatcatcttcagttgtaccagtgatttgatagtacatttccgggttgataccttgttgttgcatgttacctaagtattgttgtaattgactgttgatttcttcgtcaatcattgcttgaggtaattcagcgattgttgcattttcagttgctttagcaacggctgtatcttggatagcagcatctgcagcatcatttttttgttgttttaattcttcacgaattttttcttttaattcgtctaatgtatcaacactttcgtcgatatctttagcaaattcgtcatctaattcaggtaattccttagctttcacttcatggattgttaccttgaagatggcttctttaccagctaattcttctgcttggtaatcttcagggaaggttactttaacatcaacgttgtcgtctgctttgtgaccgactaattgatcttcgaaacctggaatgaatgaatttgagccaagttctaatgaatagttgtctgcttgaccaccatcaaaaggtacgccatctacagaaccagcataatcgatgacaacagtatcgcccttttcagcagctgcgtcttcttttaataccaattcagcttgacgttcgcgacggttttcaatttcttgatcaacgtctttgattgtaatgcgacggctttgttttggtacttctaagcctttatagtcgcctaaagttacttctggtttaacggtgacttgagcagtaatcacccaaggttcgcctttttccattttttcaacattaatttgtggttgatcaactggttgaatagcagcttctttaacagcagcatcataagcttctggtaagattgcatttaaagcatcttcataaagggcttcttcaccatacatcttgttaaagatttggcgaggcattttacctttacggaaacctggtgtgttgatatttttacgtacacgtttgaacgcaacgtccaaaccttcactaattttatttaaatcaatttcaaaggttagttcaccatcattggtgccctttttttcccattttgctgacataatttccctccgacagttatattcacaatctatcaattgcatacttaatcagcataaactatttaacctaaattgtaaatatttattggtctaaaaagcgataaaatccgatattttagtcgtttcaggccaacttttatcgaatttaatgcacaaaaaaactcgcagtttttacactacgagtttttcgattcaactaggttgaatattagtcgataatttcactaacgacaccggcaccaacagtacggccaccttcacgaacagtgaacttaagacctttttcaatagcaactggtgagattaattcaacagtaaatgttacgttatcaccaggcataaccatttctacaccttctggtaattcgataacacctgtaacatcagttgtatggaagaagaattgaggacgatagtttgagaagaatggtgtatgacgaccaccttcatccttgctcaagatataaacttcacccttgaagttcttgtgagtttggattgaacctggtttagctaaaacttggccacgttcgatgctatcgcggtcgataccacgtaataaagcaccaacgttatcgccggcttgaccttgatccaatgtcttacggaacatttccaaaccagtaacagttgtcttagcaacttcgtctttcaaaccaacgatttcaacttcgtcaccgacagtaacttggccacgatcgatacgacctgaagcaacagtaccacgaccagtgatcgtaaatacgtcttcaacaggcatcaagaatggtttgtctgtgtcacgttctggagttgggatatactcgtcaacagtagccattaattcttcaacagctttaacgtcgtcagcattgccgttcaatgcaccaagtgctgaaccgcggataactggaatatcgtcaccagggaaatcgtattctgataataattcacgaacttccatttcaactaagtccgttaattcgtcatcatcaactaaatcagtcttgtttaagaagacgatgatgtagtcaacaccaacttggtgagcaagtaagatatgttcacgtgtttgtggcatagggccatcagttgcggcaacaactaagatagcaccgtccatttgagcagcaccagtgatcatgttcttaacgtaatcagcatgtcctggggcgtcaatatgtgcataatgacggttttctgtttcgtattcaacgtgggctgtattgatagtgataccacgttctctttcttctggagcagcatcgatgtttgcatagtcttgagcttcagccaagcctttgtctgccaacatctttgtgattgctgctgttaaagttgttttcccatgatcaacatgtccgatagtaccgatgttaacgtggggttttgttctttcgtaatgtgctttttctgccattaaaacgaacctcctgtattttcgcaagaaaaaatcagtgtttagatttactaaactgataatcctttacataatattataatacttcaagcgctaaaatcaaagtgtttttttacacttgaagaattcaaaaatgattatatctgctatgagcgcgtttgtaaacacttaatgctcaaaaaaagtcagttttgaaacgatatttaggtgttttctactctaaaaatcaagtttccctgtcatttcttgcaactttttcacccagtcctgtatcttttctgaaataaccactgacgcggtataatccggacccagtaactgtttgagccatgcttgcgcccactccgtaggattatacatgatttcagcttcaaaaggatataaatatgcaaatcccatctcaacatccaccatcacttgtgctaacaaagtcggatcttcagtggctaactgctcatttaacgccgctaacaccgcattaaacgtcggactctcctccatcaattggatatcggcaggtacaaaagtttttgtctgttcaaaccattgcatcgtgactaattgttcaatattcagctggacgagcgtttcaatgacagtcgtcttcacgaaagcatgactgtaaggattcgttaaaatgggcgcaatactggtgacataaacattacgtggtaattgttcagcttgcgtcaacattgctagctgttcagctaatgggtgcgcagtgaggttatagaggccctctgcttgcttttgaatcgctgcttggtgattcgcttggtattctaattccgcagccgtaatcatcattctaagcgtcttaatgacttgcggggcaatcgtcgcatggcgtaatgcctcccacacttgatttgccgtaataaaacggtggttattcagtaataatgcaagataaaaccgcactaaatctgtttgttgtaagtagtccgcttgttgttcttcgacgattgtcaatgctgtttgcggatcaccagcttcaatcagcgcactggcccacaataaattcgccgacaacgtctgttctagttgatacgcagcttcaaaatggtcgcatgcttgctgccaattttgttgatttaacgctactttccccatccgtatcagccgatcatactgatctggaaattgcgtaatgtcacccattcaatcacttccttttgacaattaataaaacaatagcgcctagaatcaactgacctgatccagacgctattgtttctaaatgttattcagcggctttttcagcctttggtttattatcttttctttgacgacgatgattttgattaatttccataatcactggtagaatcactggccgacgtttcgtttgttcatacaagtaatgacttaagttttcccggacatcttgtttcaaatgactccagtcaaattctttgttgtccagattattttgcaccgcatttttgataatttcggcactctcagccattaaatctttgctagtcttcacgtaaacaaaaccacgtgcggtgactttcggttccgcgataatcttcttattcttgcggtcaatcgtaacaacagcgataaaaatcccgtcttctgataataatttccgatcgcgtaaaacgatattcccgatatcgccgacaccgctaccgtcaatcatgacgtcagttgcgtcaacttgtccgccaacatgcatcttccctttttcgtaagcgacaatatcgcctttaccaacgatgaaaatatctttgtaatccattcctgtttcatgagcaatatcagcgtgtgctgctagttgccggtattcgccttgaacaggcattaagaattttggttgcattaaattcaacattaattgcaagtcattcttattggcatggcctgaagcatgtaaatcatcgccaaccgccttaacttcgccacccgcacgataaatcatatctttggtcttcgctaaaatcgtttccatcgcgtgtgaaggagatgtcgttaaataaaccaagtcgccttcttcgatgtgaattaaacgatgatgactagttgccatcttttgaagcgccttgattggttcgcccatccgacctgtttctaagatcactgtttgttctggtgcaagtgtgcttaaatctttaggttggaccaagatatcgtcatctggcaaaataatcatcgataatttcattgctgtccggacgattttttctaaatcacgacccgttaaaaccactttacggcctgttttataagccgcatcaatgacttgttgaatccgcataatatttgaagccactgaagccacaatgatccgacccgtttgatacttgaacgtttctaagatggattcagcaatatcgcgttcgttagccgttgcaaatggtgattccgcattagcagaatcactcaagagtgctaaaacaccttgtttgccaatttcagctaagcgtgcataatccgtttgatacattggcattgctgattgatcaaacttaaagtccccagtataaacgacttgtccttcatccgtcttaacgacaatccctaatgaacctggaattgtatgcgttgtcttgaagaatgaaacggttgcgcgttcaaaatcgattgctgtattcgcatcgatgacgtggaagttttggaacttacgtaattttggttcgctgctaaccgtaattttagctaaagcaatcgttaattcagacccaaagactggtacatcatgttcctttaagaaataaggaagcgctccaatcgcatcagcatgaccatgtgttaggaaaatcccagcaacacggtctgcattttcttctaaataggtcatatcaggaataacgatatcgatccccaataattcagtttctggatatttcaacccacaatctaatacataaatttcgtcgtccacttcaacaatgttcaaattcttaccgttttcacgaacaccgccaagtggcataatcttaatgttactcattctttcacctctagcacttgaggaatttattccccaaactattttgtttgttttagtcgttcattcgtttaaaactcatccgccttaaagtctaactcatattttatcacaatttaaacaaactaacagcttttgattactaaaagccttttgagcacaaaaaaagcgggtccgcataacggacccgctttttgaaaatgaattaacgacgtaagccaaggctcttgattaattcacggtaacgttgaacatcgctttcacgtaggtaacgtaataagttacgacggtgaccgatcttcttcatttgaccaacatatgaatggtgatctttcttgtgaacagataaatgttcgtttaatgagttgatttctgcagtcaatacagcgatttgtacttctgctgaacctgtgtcgccttcgtgacgagcaaattggttaatgatttcgttctttttttcttgtgaaatagccatgctaatttccacccttctggtataatagcctagaacaacgtaaagcgtcgggtgaacgtcgctaaacagagtagtaggcctgtgcaataagcacttttcaagtttactaaatattagcgtcaaaagcaaggcacagtttcaaactatttaagcagtcaagttgaaatactttacaagtttttattgcaatcactctcactattttggtataataacgactgttgaaattaaaaatcttttttataaagatagtgaaacccatcggaggtgaacaacatgccacaaattaaatctgctatgaaacgtgtgaaaacaattgaaaaagctaaccaacgtaacgcttctcaattaagcacaatgcgttcagcaatcaaaaagttcaaagctgctaaaacagcaggcaacgaagaagctgcagacctattgaaagctgctacacgcgcaatcgatatggcctcaacaaaaggcttaatccatgccaacaaagctggccgtgacaagtcacgcttaaacaaaatgatggctaaataatttaaccacaaaaaagcccccacaaccatttggtttgtgggggctttttttgctttaagcaacatcatctgtcgcaaattgtaacataaacagttcaaacaataaggttgcttcaccttgcccagtctttattttttcttcaatgccctctaaacctagataggcttgggcaagcgtcgccttagaaaagtgccgaatttgttgcaatgctaatttgatgcggtatgggtgaatttttaagacgctcgccaaattaccttggctataccctttttcaaaaagaattttcacttggagtaacaagcgaaattggcccaacaagatggcgttaattttcagcggttcttctttttgtagcaataaatcgtgatacatctctaaaaccggaccgacctttttttgtaaaactaacggcaccaattcaaaaacattatcttcaatactacttgccactaatgcactaacggccgtttcagtaatcacccggctttgttgcgcgtaaagcagtaatttgggtaactcagccataatctgactgtaatcaccattagtcttgcttaacaataacgtcattgccgctggttcaatcgtgacttgttcactttgcagttgcgctgtcactaactgctggacctggcgctcattaatcttttgaacgtcaatgacagttgccatcttcttcagttgtttaacaatcttcttgcgttcatccaacttcgcgtatggcgcgaagataacgagtgccgttgtcggttgtggctgttctaaataagcttggaatccttttaaatcatgatcaagtttagttttaactttttcacctgttaagaagaatggattctgcataaaaacaattcgtcgctcaccgaaaaagggggccgattccgcatcttctaatgcccgcgccacctccgtctggacgagatcataactcgcaaagttcatcgtcatttcttctgtcgaaagcgttgctttaaataacgctctaacctcttcaatcagcgctgactcttgtcctaatacgagatacaccggtgcaaacgttcctcgattcagtgctgtttttagttgttctgtcttcatttagtcacaatcctttagtgttgttttaatcattggcacttggccaaaaccatagcgccattccagcatcccacagtcagccgtattccaaaatgggacgttcgcacgttttaaagtctgcaacgttgcggcatgtggatgaccataacgattatggcgtcccgcagaaatcaacgccccttttacctgccacgtcgcaattgactggggatcactcgccgtttgactgccatggtgacccacctttaggtaatcaacgcgtaattgtgggtagcgatcaacgattgccacttcacccgctttttctaaatcaccagtaaataaccaactcgcaccaccaatttgcgtttgcaaaacgagtgagtcagcattcccgcctggtccggccaccactggcgctaacacattgatttgttggtgaccaatcataaaatgttggtccgccaaataaggctcaattgcaacttttgtaagatgcggccgcacttgccgttgaaactgccggttttgcggtaagcccgcagcacaaatcaaccgtttaactcggatatgttgcataatttcatttaagtcccctatatgatcagcatcctgatgcgataatgcgattgcctctaaatgatcaatgccacagctgtagaggtaattaactgttactttttccgcccgactcacaatttgccgccgttgccacttttcttgcggtaaagctagtcggccgccggtgtcaattaacaggttatgtcgattgaagggttgttgaatcaacaggctatcgccttgcccgatatcaaacataatcacgcggccaaccggattaaagtggataccaataaaactaatgacatacaggctgataacagccccccagccccactttgctcgccgaccagtacttgccatcaaccatagtgtgcctatcacaattaaaaagagtggtattagctggattttaccgaaagtaattgtcgcatatgggaacgttgcaatccaagctaatcctttatacagcgtcgttagcaggccttcttctaaccaaactatcatatgactaacaggccataagcaaatcgctaccataatcaaacccaacatgactggtaagaaaatcggcgcgacaatcccattaatcaaaatcgtcaagatatgccaacgataattaaaccgcaagcacaccggtaaacttaacaagcctagccaaaatgccgttgtaaaagtaccatggcgccgctgataaatcaatccaaaagccatcagatagctcagcaatccccccatactgattaataaatacggctgccataaaagattgaccagcaatacccaactccaactatctaaacgcgattgctgaaaatgacttacttcgcagattaatcgtagtaagatcagcccgatagcgcgtgtaatactcgtgcctccccccacaaacaacgcataaaggggtagcaaacaaaacaagctaacattcacccattcacgcgggactcgacacagcgttgccaatcgacgaatgattgtcacaaagtagaatacatgcaatccggataaactcaataaatgaataatccccaattgacctaacacattctggtaggccaggccatctgactctcgaacaccacataacaacgcctctgcatgaaaactcaacgctggtggcaattgtcggagataaatcagcccctgttggcgccgttggtggaaccaatctagccaaccttgtggtggaatgcgtctaaagaccgttccgtcaattatatttgcttgataaaaacaatgcttttgctgccccataaagcgcgcatagtcgaactcattccggttagtagcaccttggatacgctctaattcaatatcacccgctaataataacggctgattcgtcgtttgccaacggcgtttttccgctgaactctggcagcgatagtagcaaacaacacgttggtcatcattctgcccctgcgccattaattgaatctgatcgccagccactttgatcgtatcgggttgaatcttatatacttgattatttggtctaaccggctgttcgtaggtgcgccgtgccagccaaaaatggcaaccgcctaaacacagtaccagtccactgaccattaacacagctggttggcgtaagcaccacagtcgcagtagacacactatcaaaagacagctaaaaaaaagtggtgcttgtcctagtaataacgcatttaaacttgctaaacaaataactggataaacccagttattcttaatcactcagcagtttgttcattctccaaaaagttaacgagggtgttggcgtcattcgccgttaaatcgacttggtccaattcaatactagatttttcaatcaattcatacgcatattcgtcgttatgataatccttttgataatggattttactgatcccagcttgaataattaatttagtacactgaagacatggaaaatgtgtgacataaatttcggccccttccgtctgcacaccaaacttagcgcattgagtcaaggcgttcatctcggcatgaattgttcgtaaacaatgcccgtcccgtaataaacagccaacatcgatacagtgactttcatgtgccaccgaaccgttgtagcctcccgcaataattcgccgattacgaaccaccaacgcacccacaaacaatcttggacaggtgctacgcatcgacaacaagaccgattgaagcataaaatattgattccacggcattctcttttctgacacacgaattccccctttaaagttaatagttttagtatagcaaaaaaataccattcacaaactaattaacacaaatttgtggccgtaattgttcaaacgttttcggcccaattcccccaactttttgaagatcttcgatttgtttaaactgcccttgctcatcccgatatgcaattatttgttcagcttttttaggaccgatgccatttagcgtttgcaattgtgtcgcatccgcttggtttaggttgattttagcatcagttgatatcggactggctcccgcttgattgtcagtcgcagcctgtggctcgtctgccgctttcactaattcttcggcttgcaccgcttctcccttagttggcacatagataataagttggtcactcaatgtttgcgctaagttcaactgactcgtatccgctgcttcggtcacatcccccgcttgtttcagcacctcaaataaacgcgtctttgcaacacaaatcggataaatccctggatgtgccacagcgcctttgatatcgacaaacccaccttttgagacgcttttcttctgtttgacgggttttgccttcacttttcgcttagttgattgcgccatcaattgttgattggttgatagaaaacgttgttgccgactatgctgccaaaacacaccaccactaagtaaaattatcaccaaacaaggtacccaccagaatcgacgataccgttgccaatagtcgcgccacatttttcgccacctccttattcctaattaccccaaaacgcaaaaaaaatttgccgattctttcgaaccgacaaattttttaatgtttggctaaataatccaatgcgtcgtccaagtttttgacaggaacgattttcatcttagtaccaatttttttagcggctgctttggcaatcgcataattattttgataatggggttctacctttagtatggcttttgtcacgggatcatcaggtgcgaaaaagactttggcgccttcttgactcgcaatcagtaccttcttatcaattccgccgattggtcccactgtcccatcaggatccattgtccccgttccagaaatcttgcgaccacccgttaagttttgtttcgttaattggttataaatctgtaacgtaaacatcaagccagcagaaggaccaccaatttcacccgcatcaatcttaaccggcacttttgtcacaatttttgagtgatctgtcagcgtaattcccaaaccagcgtagcgcgatttaggtaatttaatcaatttacgggtcgcagtcttacgctggccattatgttcatagctaatcgtgactttttgattcactttaagcccttgaacatacttgacgaacttatttgcactcttaaattgatgctgatcaattgccgtaattgtgtcaccaatagccagatcttttttaaaagctgaattatctaaaattgacatcacatagacacccagatattgagtgtggtattcctgatgtgccttttgataagccgcctcaatcgcaaaattaatcgagctttccatgtagtatttttgaatctgatcatacgcttcagtatcatcgtcacccattagttcatcacgactaataatctccgtaaaaggttgtgttttagacagtaatagctgtaaccccgtcactggtccttgaatcccgacggttgttaacataaagtggcccttatgttgatctcgttgaccgttaactttaacaaactggttggtattttcggccgaaccgaccccttcgacgtaataatgcgttgggataaagcaaaaagcaaacacgacgatcaagccaacaatccataggagatgcttcaatagacgtttattcttattcatattaatcactttcaggtcctaatttttgtgcaagcgcagacgcgacaaccggcggcaccaattgttcaacctgcccaccaaacgttgcaatttccttcaccatacttgatgaaataaaagcaaattcttgctttgctaataataacaccgtttctaaatcagcatcttgtgtctgattcaacgccgcaatatcacgttcatgctcaaaatcattggcattccgaataccacgaatcaaatatcgcgcaccgacttctttagcaaaggttgccgtcaacgtcttcgattgtgcgattaccttaacgttatccaagtgttgcgtcgccgcttcaatcagttcaaccttagtagttgcgtcaaataacggttgtttagcagcgttagtcattaccgcgataatcacttggtcaaacaagtgacttgcccgttcaacagtatcgagatgcccatttgtaaacgggtcaaaacttcccggaaataatgcaattttcggcatatagctgcctcctaaccaataaatttaaagattgctacttctgtaatcccataattctgttgccgtttcagtatgtaatgcggaatgtcagttggataatcaaccgtcgtatcggtttcgcaaagaatcgtcgcgtctggtgctaataaccccatttcgacgaattgttgtaactgaagcaacatctgttgttccttgtagggtggatctaataaaattaaatcgaattgaacaccagcatccgctagtttcagcaacgctttttcagctggcatcttccagattgtaaagcattctggcattttagtaaccgcaacgttttcttcaatcgtttgaatcgctgcatattggcgatcaactaaataagcatgatccataccgcgtgaaacggcttcaattgcgagaccaccgctaccggcatataaatcaagcgcctgcccaccgtcaaaaaattgccccaacatactaaacattgcttctttaaccttgtccgttgttggccgtgttttcatcccagggacagcttttaacttgcgacccccaaattctcctgcaataatccgcatctctattactcctctaattctgccgcatcggcaatttcttgatctgagcgtcctactcgattactgaaatccatatcaatagctggtctttcagaaggggtcactcgtttgacgtagtgtaatttttttaaccgttgcataacagtttcggcatctgccatatctacgtatagataaacatatttcattcgtttcgaggtgtaatacacaagtccgtaacggcgtaattgctttacttgtcgtaatgaatagagccagacgacaattccttggcgttgtgtgatttccaatgtcatttaatcagtccttttacatttagtcaaaaatcatcattgtttgttcatcggtacacagaagcgttaagtgctgatagcttggattattaatcgtaagttgcaacgctagattctgttgttgcgcaagcaccagcccttgggaattgagcccttgtggccaataaaaaagttgctcgcgctgcggaaaacccgctgctcttaacggagcctgtttaaagtcggttgctgttaaaaaggcgtccgtctcttgtgtcgcttgtttgcgcacttggtgcagcttttgcagtccctttttagtcaaccactgcgttggtgtacttgttaattcactcaccaaattctgtgtattttgcaatggtagttgatttatcgtgagcgcaggttggtcattattttggcgtaatgtctgcaacgtttgcaccaaagcgagttgtcgttgactatctgtttgcggttgttgcgactttgctagctcatccactgggactggtgtttttgaaacaactcgatataaatcagtttgtagcagtcggttcgcatttaaatacatcacagctgtcaatcgttcttgctgcatcactaaagttgcaaacgtctggtttttaaacatcactaacggcgtttgttggtgttgctccggcgttaaccgcaacttaaattgttgctcgtgtaacgtcactaagagcgaagttggtaacgccgtcttcttagttaatgtagcccgcttttgaaaaaaatgaaacggcgccacatcgttgtccgcaccaacaaccatgatttgttgtgtttgattggattggttatcaatcagcgcttcgacatactgtcggctatctaagtgaaataaccaccgtcgttgattttcatcagtcagctgttgctcgaccggttgcccataggttgcaattaattgttcagctggttgattaatcagtttcgccggcccttgtgttttcgtcagtggcgtttgttttattgaccgttcagtcgacggggcttgtgcaaccttaggctgattaaccgctggtgtttggataatcggccaaccataaaggatgaccaaccagacaatcaatgcaacgattaatcggcgtgccccttttatcatgctttcacctcactaattcgctgccgcagcttttttctcttgtgcgctgatgttcaacacgattcccagtgcaatcgctagaaccatcatacttgatcccccataactgatgaacggtaacgtcaccccagtaatcggtaagattcctagcaacccaccaacattgaatagggtttgcacgaaaatgatagtgccaattccgtaacataataaagtgtgatacatcttagtcgcatgaatccctaggtaaaaaatccgtgctagtagcgcaaatagtaacgcgataatcacgagggtcccaatcacacctaattcttcagtggtaatcgataaaataaaatcggtatacggttctggtaagtaaccgcgcttttggatactattgccaagccccaagccaaaccaaccaccattattaatcgcatagtaggaattcactaactgactcccacccatattttccaattcaaatggatgtaaaaacgataaaatccggttgaacttataagaattaacgttcgttgaaaagttaaagtgccgtaaaatactaaataaaatcataaccgttgttgtgaccgctgtaatcagcgaaaaaccataccaatatgacataccggtgccaaaaaacatgactaccatcacagcagccaagatactagcgccccctaaatcaggttgaataaacaccagtaggatgattccagcgactaatacaaccggactaaagaataattttaaattatcaacaaatccgtcggccagttcattttccttacgcgagagcatattagcaaggtaaataacaatcaataacttcgcaaattctgacggttgaatggtcagtggtcccaattgaatccacgcggtagccccattaatcgctgcgcttggtctgaaacgacttaacagcaataaataaatgagcgccaagaaaaccacaatcgtcattgcttttagaaaagtgcgattttttaaaacggataacttaagaaaatatgtgatcatcatcaagataaagcctaatgcgataaacactaattgcttggtaaaatacgcatctggtttcattccgcgaattgacattaaatccgaactcgccgaatagaccattaaagcaccaaatgcacataagataacatatggtagcaataaccaatagtctaaatactgaattttacttttttgaaactttttccacacagttacacctaatttctatttcgttcgtattcagcctgtccttgcccaacttgcatgccaatttgattgacccgttcttctaactcacgcatcaaagttgcaccctgtggcgcactaataagttgcatccgttttgcaaaatcaacctcgcgcgagaaaccaaataattgggtatcaattacctcttcaataattggacattgactcatacaaagcgcatcaatttgagcacgcaatagttgctcaatgcgtagcgcatccgcttctaaagtgagataagctgttgttttttgttcaatcataatttacgcctacctattcgttattaaaaagcatactctgttcgttattataccatatttatgcacaaaaaaaggtagccaagcggctacctctaatggtttttaatgattaaccttttttacgtttcttatcagctttttgacgcatacttgtgtcaagaatcttcttacgtaaacgaacagaagtaggtgttacttcacagtattcgtcatcgtttaagaattcaattgattcttcaagtgacatttctttaggtgtcttgatggcagctgagtgatctttaccagaagcacgtgtattcgttaagtttttacccttagtaacgtttacggcgatatctgtatcacggctgttttgaccaacaatcatgccttcataaacatcaacgccagcgccgatgaataattggccacgatcttcaactgattgtaaactataagttgttgatgaacccgcattgattgaaactaatgcaccgttacgacggcctggttcccagttcttaatcactggcatgtatttttcgaaggtatggttcataattccgtatccaccagtcatcgttaagaattctgttgaataaccgattaaaccacgtgaaggtgctaagaaagtcatccgtgtttggttattagcatcactttccatgttttgcatttcacccttacgttgggccattgagtcgattactgagcctgtatattggtcaggtgtgtcgatttgaaccatttcgaaaggttcgcatgtaacgccatcaatatcgcgatagataacttctggacgtgacaattgtaattcgaaaccttcacgacgcatttcttcaactaagattgaaagatgcaattccccacgacctgaaacaatccaagcgccagctttgtcggtatcttcaacacgaagtgaaacgtcagtgtgtaattggtgacgtaaacgttcttcgatcttacgaccagtaacgaaatcaccttcacggccaacaaatggtgaatcattagcagcaaatgtcatttgtaaggttggttcatcaatccgtaagattggtaaagcctcttgatggtcaactggtgtaacagtttccccaacatagatatcttccatcccagaaacagcgattaaatcgcccgctttggcttcttggatttcaacacggtctaaaccgatgaaaccaaaaatcttagttacgcggaagttcttagcagaaccgtcaagtttaagaacagaaacttgatcaccgatcttgattgtcccacgagaaacgcggccaatcccaatacggccaacatagtcgttataatctaacattgccacttggaattgaagtggttcgtcactattatcaactggtgctgggattgtatctaagattgtgtcaaagatagggttcattgtatgggcttgtgtatctaaatctgattcaagacttgatgtcccgttgatggcacttgcgtacacaactgggaattcaagttgatcttcatcagcaccaagttcgatgaataattcaagcacttcatcaacgacttcttcaggacgagcgcctgggcggtcaattttgttaatcacaacgattggtgttaaatgttgatctaaagccttcttcaaaacaaaacgtgtttgtggcattgtgccttcaaaagcatcaacgactaataacacaccatcaaccatcttcatgatccgttccacttcaccaccgaaatcggcatgtcctggtgtatctaagatgttgatttgtttgccgttatatttaacagcagtattctttgaaagaattgtgatcccacgttctttttcgatatcatttgtatccattgcacggtcagaaatttctgcgtgaccatccaatgtatctgattgttttaacatttcgttaactaaagttgttttaccgtggtcaacgtgggcgataattgcgatattgcgaatgtcttctctttttttcaagtgtttcagcttcctctcgctagtgacttgactagtgttgtttgtctcatgtatacaagctattattttaccataaaaaaatgggctgtgcttcatatattagcgtttttttgaaaatacgcaagtttttttcatgaaaatttaattatctttaatcatttgaaccattcataatcgtgacaatttcttgtattgcttgctttggcgcgataatcatcccttcttttcgcatcatggaaattggttgaccatcaaattgtaaaacttgaaaacctaacgtctcagctaaaacccgacctgcagcaatgtcccatggcgctaatttggagatgtaagcttgcacttgccccttcaacaaatgggcgaaagtgataccggcgctaccgtaaatccgcacacccgaacattgatacaacacctcttgcaagtgtgcttcattggtgaccagcatccgtgtattgacacagattaacccttcttgcaacggctcgtcgacagcatttttgagggcagcttcgttttcgaatattcccaactgtggaccgccccagaacaattgatcggccatcacatcataaataatcccgaatagcggctgaccgtcttcataaacgccgatcataatggcgaaatttgcccgttgcttcacgaaattcatcgtgccatcaatgggatcaataaaaaaagttagtccctgttgccaatcatcaggcacctcaccggcaccttcttcccccactaattgcgcgttcggataagccgtcttaatcttttcagctaagaaagcttgattagcacaatcgacattagtcactaaatcattaggcccagacttagtactaaccgttaatggttgtttaatttgtgtgcgggtataggcagctgcttcaaggatccacttttgcagcgaacgacttaaccgatacaatgcttcttgttccattttttcatccactttcactaattaagcgtcattttgatttgggttcgactactcctctttgcagcctgcatacaccgatatattgaatagcctgacgcttctgaaaaggccttatcaatttttttttcttgcatcttactttgaacaaccactttgaagtcacgataagcagcttgtaaatccgcaactttcgcaccaaattcataagcttgttcaacaagattatataatttcatgacttggacaacttcagctggcgtccagtctggttctaaaggataactatagttcgtttgcataaaggctcctaaaatttgcataaatttgcgccagtttcaattcaactgatgccattaatctctcatattataacgcacttttttagaagctgtcgaatccttttagaaatagcggaatcaaaaaacgacgcactcaactggtgcgtcgtcattctaaactatttattaaatatgaattggcaatcctaatgctaattcggcatcatccataatcgcttcacttaacgttggatgtggatgaatggttagagcaaggtcttctgcattcatgcctgattcaacggctaacgtcaattcagaaattaaatcactcgcgccaacgccagcaacttgagcgcccagaactgtgttatcatccgtattcgtcactaaccgcacgaaaccttctgtatctgctaatgataaagcacggccattagctgcaaatgggaacttaaatcctttagcgttcattccttttgccttggcttctgcaaccgttaaaccggtcgttgccaactcaggatctgtataacaaacagctggcattgcgtggtaatcaaccgttactttcttaccggcaatggcttctgcagccactttagcttcataacttgctttatgcgccaaagctgctccagcaacgatatcgccaatcgcatagatgcccttaacgttagtttggccttgttgatcaacttcaatcaaaccacgatcagccatcttaataccggcttgttcgagtcccatttcgtcggtatttggccgccgaccaacagtcaccatcacgtaatcggcaacaagttgttcttctttgccgccgacttcatatttaaccgtcacattttgatcagtttcaacagcttcttttgccattgcgccagtaatcacatcgacccctttagccttgaagttctttgtcaccaattgcaccatatctttttcgaagttaggtaaaatcgagtctgtcccttcgagaatcgtcacatgtgcacctaagttggcataggcccctgctaattcagagccgatatagccaccaccaatgaccactaattcttttggtacttccgttaagcttaaaccaccagttgaatcaataacccgtttattaaatttgaagcctttaatttcaattggacgactaccagtagcaatgattaaatttttaaaactgtacgtttgtgcactctcttctttaatcacgcgtaagctatgttcgtccactaaaaaggctgaaccgtctaacacatcaatcttgtgttttttgaacaacattgaaatgccaccagttagtttttcaacaacctcatgttgtttccagtcttgcgttttcgcaaaatccaatgttgctccagtagtcgtcacaccaaagacagatgaatctttcgcctcttgtagtcgatgaccagctgaaatcaaagccttggaaggaatacagccgacgtttaaacaaacaccgccaattgtttcacgttcaatcacagttactttttgacccatttcggccgcgcgaattgccgcaacatagcccccaggacctgaaccgatgactactgtgtctaattcaattgcaaaatcacctacaaccattttaaaatcatccttccatcaataatagctctggatcagctaataattcttttaattcgttcatcgcacgttgcgcagttccaccatcaattaaacgatgatcaaatgatagtgataatttcaagactttgccaacagccaactcaccatcagcgttgacgattggttctgtcccaattcggccaacccctaagattgcaacttcagggtagttaacaaccggtgtaaaccaaccgccaccaattgatccgatattactgattgtcattgaaccaccactcatttcagctggtttcaatttgttatgcaatgctttttgcgtattttcgccaatttctttagcgatggcaaaaatactcttgctgtcggcatccttgatatttgggacatagagcccgtgatcagtatccgttgcaattccgacattaatgtagtgtttataaacaatttcgttagttgcatcatcaattgacgcgttcaaagttgggaagtcacgtaagaccgttaccaaagctttaacgatgtatggtaagaaggttaacttaatgtccttcttagccgctacatccttgaatttcttacgatgggtcatcaatttagaaacttccacttcatcgaataaagtaacgtgtggtgccgtatgcttgcttgtcaccattgctttagcaattgctttacgcgttggtgacattttttcacgtgtttcccgttctggtgtaacagaggtgtatggtgtcgcagcaactggttgtgcagctggtgttgctggcgacgttggttgttctgctgtctctacagcaggtgctgtcgttgttgcagcgccattttgcatgaagatttgcacgtcttctttagtaatccgaccatgtttaccggtggctggcacttgactgatatcaacatcgttttcacgtgcgaattttcgaacagatggcatagctaaaatcgtccgattttggtcactaatcgcaactactgcttgactgcttggcgccgttgttttagctggtgttgattctgacgccgtagctggtgcttgttcagcagatgttgccgttgccgaattgtgacctggagcatcaatttcgaccaatacttgaccgacagtcgccacttcgccttcaccgactaaaattttaacgactttcccactaacaggtgatgggatttcttcaactgatttatcattttgaacttctaataaagtgtcatcttcttgaatggtatcgccttctgcgaccgcccatttttgaatttcaccttcggcaatcccttcaccaatatctggtaatttaaattggtaaacaccacctgcatcggttgcagtcggtgctgcttcgggtgtagcagctggtgttgccgtacttggtgtatcgttaccttcaacacctggtgcgtcaatttcaaccagtacttggccaactgttgccacttcaccctcaccgactaaaattttaacgactttcccactaacgggtgatgggatttcttcaactgatttatcattttgaacttcaagtaagacatcatcttcttgaatcgtgtcaccttctgcgactgcccatttttgaatttcgccttctgcgatcccttcaccaatatccggtaatttaaattgatatgccatacgtctaacgtcccttctttcgttatcgactaaaagttaataacttctttaaccttattttcaatatcagttgcatttggtaaccaagttgcttcagcttgtccaaatgggaatggcgtatcaggagctgaaacacgtgcaattggagcttccaatgaaagaacagcacgttctgaaatttcagaagcaacttgtgccccaacgcctgcttgtttttgtgcttcttgaacaataacgacccgccctgttttttcgacagaggcgataattgttgcaacatctaatggtgcaattgttcgtaaatcaattacttcagctttaatattctctttagctaggttttcggccgctttaatcgcttctctcaccattgcaccgtaagtgatgattgaaacatctgtcccttcagtaaccacagctgctttatcaagcggcactgtataagattcatcaggtacttcttcgcggaacgaccggtataatttcatgtgttcaagatacaaaacaggatcgtttgaacgaatcgcagaaatcaataagcctttggcatcatatggattacttggcacaaccacgcgaatccctggaatttgcgtgatcattccttcaaagttatctgaatgtaattctggggtatgcacgccaccaccaaatggtgcacgaatcgtgattggcatgttgcgtgtgccacccatccgataacgtgtccgtgacatctggccagcaatcgaatccattgtttcgaaaacgaaaccaaagaattgaatttcaggtacagggcggaagccttctagtgctaaaccgattgataaaccaccaatcccagattcagctaacggtgtatcaaaaacgcggtcttcaccatgtttagcttgcaacccttcagttgctcggaaaaccccaccgttcttcccaacatcttccccgaaaatcaagacgttcttatcatctgcaagttctaaatccagcgcatttgtaattgcttgaatcatcgttttttgtgccatcttaattcgactcctttgcactgtactctgcgatttgttctttaatgttttgtggttggtcttcaaatgtaacattcaagaaatctgtgactttttgttttggcgcagcatccgcttcgttgatggctgctttaatgtctgttttaacttgttcgatcaattggtcttcttgatcttgtgaccaaagtcccttatcagttaagaaacgacgcattctaacgagtggatcacgtttcaaccaaatatcgtctgtttctttggtccgataacgagtcggatcatcccctgataatgtatgtggtccataacgataggttaatgtttcaattaagaccggtccgttgccagcagttgtaaattcacgcgcttctttcatcacttcataaactgctagtggatccatcccatcgacttgaatggcagaaatcccagctgcgacccctttttgagccaacgttacagcagctgtttgtttttcacgtgggaccgaaatcgcaaagccgttattttgaacaacgaaaatggctggtgctttaaaagcacccgcaaagttcaagccttcatagaaatccccctgtgaagtcccaccgtcaccggtataaacgtaaacagcattttctgattggcgcttcttcatcccaaccgcaacacccattgcttgaatgtattgcgcgccgataatgatttgtggtggcatcgccttcaaagattctggatacttgttaccgtcaatatggcctcgtgaccataggaatgcttgtgataaaggtagcccatgttgcactaattgtggcacatcccggtaaccagggaataaaaagtcgtctttagtcatcgcaaagttacttgctaattggctggcttcttgcccagcagttggtgcataaaatcctaaccggccttgacggttcaaagcagttgctcgttgatcaagcacacgcgaccaaaccatttgtttcatcagttcaaccaattggtcatcactgagatccggcatcaattccggattaacaacctggccagtctcatctaaaatttgaacggtcttaaaatcttggctctcatcgctcaataacttctcaaaattaactgcagctttattattgaccatagtatccatatctcctctttaaaaaactgttttaatgactgcttatatctgtattacttaagcatctttacaagactaatttagcatttcacatcactaaatgcaagcgttttataagctatattagtcagtttacgctttcattagtttttattatatgtgaatctaatcactagttagctaattttcacgtctgttctatatctgttataatttaatttcgttttctgttatataatagcaaataataggcacaaaaaaagagtccgccgtagcagactcatcgttaaatttaagttggggtagttctatgccaagaccggttggggtatctcagcgttgccagcatgcactaagagctcttgaaacactctgactactggtttaatttgttgactgacttgcacgcaccgttcacttacccgcaaatcatttaaatcaatcgcaaccttaatttgaccaaggttgactaacttaatcattgttagcaggattgccccgacaaccaacgttgccaagcccatgaaagcgaattgattaaccattaatactgcacaaaacgaaaccaatgcagctaccgccatcataaaagtgcttcccactctaactttaggtgtttgtgctttagcaccaatcgttgcatctagcacaacgccgtgcaccatttcagtcactacctcgcccgcttcaataacgttaacatctttgttaactgttgcgattgtaacgggtgtcttttcgctagcagccaatactaaaatatcaccgggcacaatttgatctgcaccgattaagcgtaaaaaaccatcacgcataacgctaacccgtgcttgtgaattttctaatactgcttctcttttagcagcttcgacagttgttaagccacttggccgagttgccaataaacgcattaacatcccactgcttgtaatgccagtgatgttaacgtctttttttaatttcttgtgcatcgcgttcgacactccttcccttttgaggaagtcgtcgtaaaccgctagcctaatgctggcagtaaaatgacagaccacctcgaatgatcaccatcgctactacttacaggtccttcagctgttttcatcattttactcaccagactttctctactttaaatttagtcataccgctttatccgacaaaaaaagacgcacaacaattgagcgtcatccatttatcatggcgttcccaatcgttcagttttagcactatatgacgtagaaaccatgttcagctacgttagaaaaagccttcattggcagtttcagttgactcaattggcatctctcgatgtttctgagtagcagcgtttgttcatataggagcctcacctaacggaaaagcaatatatctatactcttatactacccgtttcactttagcaggtcaagcaattcattccgttttaacttgaattgtgctagaataatgaatgacgaattaatcggaggtcttaactgtgatattaatgaaagatattatccgcgagggtaacccaacacttagaaaaatagctgaacctgttacttttccgctatcagatgaagatcggcaacttgctgctgacatgatggcatttttagaaaatagccaggatcctgaacttgctgaaaagtaccacttgcgcgctggcgtcggtttagctgcaccccaagtagatgtttcaaaacaaatgtctgctgtcttggtccctggaccagacgaacccatcttcaaagatgtgattatcaaccctaaaattatcagccactctgttcaaaacgcagcacttgctgaaggtgaaggttgcttatcagttgaccgcgaagtgcccggctttgtgccccgccctgaccgtattacactacgttaccaagatttagacggtgaaagccacaagattcgcttaaaaaactacccagctattgtgtgccaacacgaaatcgatcatctaaatggcatcttgttcttcgatcacatcaacaagcaagacccattcgcagcaccagatgacatgattattattgaatagaagtgcgattggttgtgcttagcaactgagcattaatacagaattggcagttatcccgaattgtgggataactgccaattttagattaaacgggagttgttgcacccaagagcacgttaaagaagaagaagtgctaattcgagttggtcaggctttgaggcttaacggtaaagactactcaagaagcacataaaaaaaagcgtgattgaaatcttctaatgagatttcaatcacgctttttttatgcttccgccgcttcaggcgtatcggcaaattgactgttatataaattagcgtacacaccaccggccgctaatagcgaatcgtgcgtcccttgttcaacaatttgaccatggtccatcactaaaatcaaatccgcgtcgcgaatcgttgagagtcgatgggcaatgacgaaactcgttcgcccttgcatgactttttccatggctttttgcaataaaccttccaatcgggtatccaccgaactagttgcttcgtccaagattaaaatcttaggatccgcaatcacggctcgggcaatcgtcaatagttgtttttgcccaagcgaaacgttgcttgcttcttcatcaatcatcatttgatagccgtttggcagcgtatggataaaatgatcgacattagcggttttagccgcatcaacgacttcatactctgtcgcatcgagtttcccgaaacggatattatcggtgattgaagcatgatataaccaagcatcttgaagtaccatcccaaattgggaacggacttgttgcttgcttaattgcttcgtgtcaaccccatcaatccgaatcgttccagatgtcacatcataaaaacgcatcaacaggttaatcatcgttgtcttcccagcaccggttggcccgacaatcgccactttatcacctgggttagcagtaaagctcaaatggcgaatcaatggtttgtctgggttatagctgaaactgacatcatcaaattcaactttaccttgaacgattgctggcaacgatgctgtttcattatcggttgcttcaactggctcatctaagatttcaaatacacgaccagttgcagcagcagctgattgaatcacaccagacaactgtgtaatctgtgagattggttggttcacttgccaaatatattgaatgaaggcttgtaaattaccaactgaaatcacaccgtgcaagacataataaccacctaacgttgccatcccggcatacgtcatgtttgtcgttaaaccaactaacggcatcatcaagccagaaacaaaggctgccttaaagccatagtcagttaaccgatccgtaatttctgcaaaagcagcaattgcgcgttcttcttgtccgtaaagtttcaagacactgaagccgccataattttcctgtacaaagccgttcatttcgcccaacgtgtcttgttggcctctaaagtacggctgcgatttctgaatgacccgtcttgaaatcaataacgatgctggaatcattattaatgataagagcgccatccaaatattaatcgtaatcatcatgatcacggccgtgatgatccctaagatcgatgtcacaacttgaattaaactctgttgtaaagcgttcgtaatcgcgtccacatcgttggttacccgtgacaagatattcccttgttgttgtgaatcaaaaaaacgaacgggtagcgcattgatttgcaaatcaatgtcgcgccgtaaatcacgcatcgcccgttgaacagcccgcgtcatccaaaacgagcctaaaaacatcgtcacttgatatagcaacgcaaagctcaaaatcatcgcaatcaccttcgcgatataactaaaattaatcgcaacgtgttgtgctaaactccgactgatttcagtaatggctagtcccatgatcactggccacagtgcattagcgagcaccgaaataacagttgcggtaatcgcaagccaaaatgtcacttgatacggcccaatgtagcgcattagccgtttaagttctctaatattcttcattgagttcctcctgtgataactgtgatgccgcaatcgcacgataaatctcgttatcttttaataagtcgcggtgagtcccaataccaaccacttgaccttcgtttaagacgacaatccgatcagcattcatgatagtcccaactcgttgtgccacaatcagcactgttgcctctttggtgattgacttcaatgcacctcgtaacgccgcatccgttttataatccaatgctgaaaaactatcatcaaagatataaagcgcggggcggcggacaatcgctctggcaatcgccaaacgttgcttttgaccaccagataaattgctcccaccttcggctaaataagtttgtaagccgtctggtttttcagcgacaaaggtatctgattgtgcaattttcaaagctgtccataattcttcatcagtcgcattcggattaccataacgcaagttttccgcgattgttccggtaaataacaccgctttttgtggaataaaaccgatcttttggcgcaacgccttaagttgatagtcgcgcacatcatgaccgtcaagcttaatcgatccacgtgttacgtcaaaaaagcgtggaatcaattgaatcaacgttgacttaccactcccggtactcccaataaaggcaaccgtttcacccggatgcgcttggaacgtgacatcccgaacgactggactttcagtcggacctggataagcaaaggagacattatcaaacaccaattcaccttgtgtgtcggttgttgttaccccgtcttctttttcggtaatattaattggcgcattcagaattttttcaattcgttctgctgaaacagcggcccgtggatacatcatgaagacactggcaaataacataaatgaaaacagtacgtggaaaatatattcaataaacgcaatcaacgtcccaaccgctaagtgaccaccatcaatctgaacagccccttgccaaatgattagaacgaatacgatattaaagatgaacgaaaagcccggttgtgctaaagccaccaacgtaaacagccggatagaactatgactgtagtcatcattcacttttctaaagcgtaatttctggaattgttcccgcacaaaagcacggacaacacgaatcccagtcaagttctcacgcagattcagattaatcgcatccagatttttttgttgttccgtcgacatcggttcagaaacgcgaccaatcaagacaacccccgttagcaggattggaattgccgcaaatacaatccatgagagcgattgacttgtccgtacaatcatgaaagcactcgcgacgatcatcatcggggtcataaaccctgtccgcaacacttgggtcataaattgcatcacctggaaagcatcattagtggtccgagtaatcaaagaagacacaccaaattcgccatactcactatgggaaaactgcatggtttgtttaaaaatatcgttacgaatgtcacggacgatattggtggttaatttgctaccagtataagccaagccaattaagccaattagtccgattaaacagattccaaccatcaataacccaaattgccacacaggaccaaaggtatgttgattaattcctttatcaataatttgtcctaataacgttggtaaccccaattcgattagaataaatccaaatacgcaaataaagttccaaaatagtaatttcttatatcggatcgtatagcgccacattaatttcatcggtgcaaactccttctaaacttcaaatttaatcttctacctgtgccatatctttaacatactcgattgtttcgcgattgacaataaaagcaacgtcaaaatgcaattgttcttccaaaaaccacacatcagtgactagcaaagccggataacgcggactgacggaggcaatccgccgttcgtaagccacttcattgagttgttcctcaattgcggctgccacatcctttaatgcagatgatgtttgtcggatgggcacttggtattcgaagaccatcacattattgccccaaatttcagtgggcaggttcgaaaccagtttggcttgcggtgcataaaaatccggctgactcgcttgcattttttgataagccaccgttgcaatttcatccgcaatttcttgactactgtgttgtaaaatccgcgtcgctctttgtcggcgtaaccgtttaatcaaccaggttaaaaaaagcgctaacgcgacaatgataacgactgacaaccaaattaacataacaatcccccacttctattgctcactaatatgataattataaccgaatcgaggcaaacacgctatttagagcacgtcgctcaatgtatactttaccgaaaagatatgctaaaatattcttaaatgttgagtaatcaacccctggacggttaatctttcgtttaaaactatgatgaataataaaggagttttacaattgatttataaagtacttttccaagcagacaaaacccaaagccctctacgcgaggcaactaaatcgatctatttagaagcagacagtgccgttgaagcacgccaacttgttgaagacaatactccctacaatattgaatttgtacaagaattatctggtaagcaccttgcttttgaacaagaatcagaagattttaaattaacggagttttaattaaatgaaactcgatattaagaataacgaaaccgccgttttcgccgtagggggacttggtgaaatcggtaaaaatatgtatggtgttcaattccaagacgaaattattgtgattgatgccggcattaaattccccgaagatgaactcttagggatcgattatgttatttcagactatcaataccttcaaaagaatcaacaaaagatcaaagccctcgtcattacccatgggcatgaagatcacattggtggtttaccttacttcttgcaacaagtccctaatgtacccgtctacgctggtccattggcacttgccttgattcgcggtaagttagaagaacacggccttttgcggtcaacagaattacacgaactaaacgaagataccgtccttaaattccgcaaaacaagtgttgatttcttccggactacccattcaattcctgatactttaggggttgcgattcatacacctcaaggggtaatcgttgaaactggggatttcaagtttgacttgaccccggttggtaatcaaccttcccctaatcttcaaaaaatggcacgtttaggtgaagaaggcgttttatgtttaatgtctgatagtaccaatgccgaagtaccaaactttacaaagtcagaacgtttcgtcggcacttcaatccgccatattgtggaacgcattgaaggtcgcattattttcgcaacgtttgcttctaatatttcacgggtctcacaagccactgatgctgcgattgctaacggtcgtaaaattgccgtctttggtcgcagtatggaagcagcggttgtcaacggtcgtgaactcggttatttaaatattcccgatgaagctttagttgatgccaatgaattaaattcgttgcctgccgacaaagtgatgattctatgtacaggatctcaaggtgaaccaatggctgctctaagccggatcgccaatgggactcaccgtcaaatttcaattcaacctggcgacaccgttgttttctcaagcaatccaattcctgggaatacaatgagcgttaaccacgtgattaataagctttcagaagctggtgctgaagttattcacggtaaagtgaataacattcatacgtcaggtcacggtggtcaagaagaacaaaaattaatgctccggttaatcaaaccgaagtacttcatgccttgccatggtgaataccggatgcaaaaaatccatacggaactcgctcaacaatgtggtgtggaacctgataactgcttcatccttgaaaacggtgacgtcttagcactcacttctgactcagcacgggttgctggtcactttagcgccgaagacgtttacgttgatggcaacggaattggcgatattggcaatgtcgtgctccgcgatcgtaaaatgctctcagaagaaggtttggttgttgttgtggcaactatcaatcttggtgaaaagaacattctcgctggtccagatatcctctcccgtggtttcgtctacatgcgtgaatcaggtgaattgattagcgaagcccaacgccgagttttccgaatgatcgtcaatacgtttaacgctaacgacaaggtcactgaaaaccaagtccgcgaagcaatcattgatggcttacaagacttcttgtttgaaaaaacagaacgccgcccaatgattttaccaatgattattcaaagtacagaataataagttttgcgccaggtcaatatatgacctggcgctttttttattgtttaatgcaagtttttattgtcaacatttggtaaaaaccgctataatatacaacagattactttttctgaaaggcggcttgttcatgccctccaatccccatttttacatcattttaaaccaagttgccggtaccggtcaggcagcgagtatctggcctaaaattgaaactcaattaaaacaaaaacaaattcactatgaccttcaactctcccactacgcaggtcacacgacccaattggccttccaatttgcaaagtttaagtacacggatcaaattttattaattattggtggagacggcacgctcaatcaagccatcaatggtctccagaatgctcagcgcggcgatattccgattgcttacattccttgtggatcgggtaatgacttcgcccgtggtgtcgggattagtcgtgatccattgaccgcactcgaacaaatcttgtcggccacaatgccaactgccatcgatttaggttattatcatgacacaacgaagaacgaccatggctacttcgttaacaatgtggggattggttttgatgccaacgtggtcagcaccaccaatcattcaaatcataaacgacttttaaatcgattgcacttaggctcattagcttacatcagctcattggttaaagtttttatgcaccaagatgcgtttgaagtcaccgtcacggctgatcaccaaaatcattattttaaacgtggctttttagtgaccaccactaaccatccctactttggcggaggggtccccatcatgcctagcgcaacggtcgacaaccatcaacttgatttaattgtgattgaaaaattgaatccctttttcttttgctatctttttgtgatgatgttgtttggtcggcacacacgctatcaagcggtgcatcactttgaaggaaccaacttagcgattcaaacaaaaacattagaattcgggcaaatggacggtgaagaacttggtagccggacatttgatattcactacagtcttaaaagccaggcattttggctaaagaagcaagcataaataaaaggcgctgcctccaagttgggggcagcgccttttaacgcgctcttcaaatcatgttcctgtgcctagcaacacaagtcaaccgattgctttcagcaatcattcgcattgttaggctagtgctcaaaagttgaccaaacttgattgcactcatttctttagaagtaatccgagaagtatggttggtccattggaataatattctcgagattttttagtgcttgtcggttggcttggagtctttcaatctttgccaagtatgatgggcgtcgatagctcatcagcattgttgttagtgtctggatgtcgcattgaattcgttcaccgactgggcgacttgtgacctgcacttttccttgttcatcccaataaacgccaaacgtaccgttattccattcagctaatggatcggtcaattcaatgtggaatgcttgcccgtccgtttcaaacggataagccaacaagaattcacgcacatcaacaatccgcgccataaaatatggcttaatcgtctggtcaatatcaccatcttctaataagaatgaaatcggttcatcctgatattgattacccttgacatgttcaatcattgaataatgcgcgccaatgaagttccacagaccaatccgggcttcttgattaagataaatcatttctttaatatggaagacttcgttggcaatccagtataaaacatagccggtgggttgttcattttcatcataataaacaccagcaatccgttcttcttcattttcccaacgccaatattcatcccagttcagttcgttacgaatcattgcaccgtgattttttagtgcaaaccgttgatacgttttaatcacgtcttcatcgtcaatatcaaggcgttcaacgtgcccatttaccggccgttgcttaggtaattggctatcacgaatatcataagttaggtgatcagacatgatctcccaccctttcttacgataaaacggaatgctgtatggatataaatacgatatccactgcttattctcacgcatcttgttcaagccgactttaaccaagtcatgcatcaaaccatgaccggcatattccgggtaagtcccgacaccagtcaaaccacccatgttaaatacctggccatgaatgttcacgcagcaatgatagatggctaattgtgaaatcagttcgtccccattaaaccatccgattacgtcagatttttctaatacgggacgtttggcgcgttctaattcgccctcttcgtagccactatcagaaacttcctgatcggtgacttgaaaaacataccgtaataagtcattaaattgttctaaatgttcaattgtcacgggtctaatctctaaattagatcgctggtcaaccattgtttcgcctcatttttcgttagttgtttaccctattatacactattttgatttcggcataaaatcgtacggtgtcaccccggtcatcccaatcattggatccacttgctgttgcgttagaacagtcggtgttaagacataactgattggcgtttcttgtattgcgtcgtcgtcttctggcactaagttcagttgttcatcaacagccgtttctggcgcacttggtggtgccggctggtcaacaattgttttggcttctgcctgccccacactggccgtcttaatggcggtgctgagttgttcaccgttaaagacactttgaatccgttcttttaacgtcgtttgccgattggccgaaagttcctgagctgctttttggaaagcactcggttcaccaatcagaatcaacaatgatttagcccgcgtgactgctgtgtacagtaagtttcgcttgagcattcgttggtattgattgaccaatggtagaatcaccatttcaaattcagaaccttgcgccttatgaatcgacgtacagtaagccaatgtaatcttgtgccactcactccgcttataggtcacttctgcactatcaaaagcaatggtgatctcgtcaaccttgtccgcactctttttagcataggtaatccccgtaatctgcccgatttcaccattaaacacattttgttccggactattgaccagatggagtactttatcgccaatgcggtagtgaacgttaccaatgctaacttgttttttgcggtcatctagctttggattcatgatattttgaatcatcgggtttaactgatcaattccggctgctcctttgtacatcggcgctagcacttgaatgtccttagtttcaaaaccacgcgctttggccttagtaacgacttgttcaatcaccgattcaatttgatacggattacattgaatgaaactgcggtctttttgcggcttcaacaaatccgctggcagttggccttgattaatttcatgcgccaacggaataatcgttgactggtcatcttgccgataaatacgttgtaattcaaccgctggaataaccttactctgcaataaatcaaagaaaacttgccctgccccgacggatggtaattgatccttatccccaaccaatacaacctgcatatgactgggcaccgcccgtagtaatgagcgaaacaagtaagtatcgaccatcgacatttcatcaataatcaataggccgccttccaattctttgttaccggaaacatctggattattttcgcggccagtgattccgagtaagcgatgaattgtactagcaggcaaacccgttgtttcactcattcgttttgcggcccgacctgttggagcggccaataaaatcggaaacggcgtgtctttgtactcattaatatctaatgacagcccgtttaattcagcgtataatgtcacgattccgttaataatcgtcgttttcccagtaccaggtcctccggttaataagaacgcccggtgagtcatcgcaagcttaatcgcctcttgttgtacgtcatcgtatgtcatcttaaaccgtttttcgaggtggcgaatttcttgatctagatcatgtttaggatagctaagttgatcgcgttcattttcaattcgcattaaatggttcgcaatttgccactccgcattaaataacccattcggataaatccgattctcatcaccaacgactttcccatcatgtgcaagtgccatcagttgttcagccaccaagttcggatcaatagcaacattgcgtgctttttccatcaactcaatactagctgccaataacggctgggcctgggtataggtatccccagcttgattggtcaactcatttaacgcttgcattaaagccccttgcacccgcacggctgaatcagcggcaaacccgagggtctccgctaaattatctgcacgtttaaagccaatcccagcaatgtcagccacgagttggtacggattttcttggataatcttcagcgtatcttcatggtaggtctgatagatgttataggccatcgagctcccgaaaccatagttgtttaagccaataataatctgttccatcccattattaatcgtcagcgtttcaacgagttgtgcttgtttcttcgcatttagccccaatggttctaacgccgtcggatcctctaatattttatcaatcgcgtcaattccaagagtatccacgattttttcggccgttttctgcccaatgcctgtgaatttttcgccagacaaataagcgactaagccggccttagtcgttggttgatccacttggtaattatcggcttgaaactgtttgccatatttaggatgagtgaccactttgccatagaaggtatatcgttcatcttctttaatgtcgccaaaactcccggtcaccacaatttctgtttcgtgccagtcaattgtcttatgtgctactttaacgagtagaattttaaaaaaattatccggactctcatagaaaatactctggacggttccggtgactgttggtttggtttcgtctgtctttgttatatccacaatcgccatcccttattctttttgctttttagcctgcatgaaaccttcaatatcaattaactgttgtttgttctttttaaaataatccggtgcatagtgcttggcttgttcgaaataaggctcactatcagcgcctaagaccagttgcgtcaagccatacttaaataatacttcaccattttgaggtgcaatggtcaatgcctttttaaggtaggtctgtgcttgatcaaaatcacccaagctcgttaaaatatcgcccactaaaagattggcgtctagttggtctggttcttgctcttgaacggtcaacgcaaacgccaatgcccgtggattctgttcgagttgatgatatgtctgcgcaagcatatactgcgcatctgttgattgtgagtcttgcaccaactgcatgaacaagggcaccgcttgttgataagcttccgcttgataatagagtgttcctaatgcgtaagtcaatgcagcttcattaggaaattgcgtcaacgctttttgcaaaagtgcttcagcttgttcaaaatctttaagcgtcgttaaaaatgtcgcaagggtaacgtaagcttcaatgtcttctgagtgatcttgtaaatattgtacgagatctttaacagcggcttcgtggtcgccagcggcccattttgctagaattgcttgcacgtgatcatctcctatatcgtatctgttgcggataattgcttgctgaggaagtgtgtatcattccacttaattagtttgaaagatgctccttgatcgtcagttgtcatcgtggtcacagatgaatttgtcacaccgccgtctttgcggacctgagccaatggtgtcttgagtaaggactgcatcatcgccaccatcgctgccccatggctgacaataataatatgatcagtcggtttagcagccttcacaatcgcgtcaattgcttgcgttgtccgttcaatcacttgttcaaaggtttcccctttaatttcagttggatcatactccgctggtgcttcacgaaaggccttcacgattgtcggatattgtttttcgacttccgtaaagcgcatcccttccattagaccgagattaaattcgtggagtgcatcaacaaccgtaatcggaaaatcctgccctaagtctcgttttagcgccgcagacgttacctgtgtgcgttttaacggactcgtatataaatgatcaaaatgaatgggctttaaaaatgtggctaattcttcaatttcaacgtaactactgtctaataatggtgaatcaccacgtgcaccttgatagcggccttccaaattccattcagtcttaccgtggcggataaaatataaggttgtcatgcgttctctccttaaaataacttacttttcattatgaaagagttacgccctaaattcaagtcaatcgactaataaagcaagcatttttcctgtaaaacgccatcaaaaaaaccgctaggataaaaatactttttatcctagcggtttcatctattagttgctctaaacgtgtttcagtaggcatatttctgcggttaaccctatttgccaaatccagttaatcctcaaaatatgaacgcttacttacacactcttttatttactttctgcgacagcttgcattgcaattgcgttgacgtagttgactggttgatcgtagtttggttggaagaacatgtcaaccattgctaattgatcaatcgtcatcttcgtttgaatggccattgaaatgacgttcgctgcttgagcaatatcatacatacttgtgaatgaaccacccaatacttgacgcgtcttaggatcccacattaagttcatcaaaaccggtgtcgttgatggcatgaaatcagggcggtaatcttgttctaacgttgttgtagcgacttcaatcccacgcactttcgcgccttcaactgttaggccactccctgaataggtgcgaccaaataattcaacggcagaagttgcttgcgtgcccatgtacttttcagttggtgtttcgatgttgcggccgattaaaaggccttggcgaacagcgttggttgccaatggaatgtaatctgctttttgtgttggattgtaatgaacagctgctgaatcgccggctgcataaacatccttaacagacgtttgcatgtattcatccgtcaaaatcgcaccgttacctaacatatcaacttgccctttgaaaaggccagtatttgggcggaagccaacacataaaattgcaatgtcggctgtgtattcgttcttatcagttttaacagtgacttgatccgtccctgagaaactgaccactttttcgctaagcgcgagggttacaccgtggtcacggtaatcttgttccacgatttctgagatattaggatcgaaattcttgccgagtgcgtgtggtaatgcatcgattaatgtcacttgcttatcagttgttgcataggcttctgccaattcggcaccgatgtaacctgaaccaatcacgataacactcttcacatctggggcgctcttcttcaattcattggcatgcgcccagtttttgcagagcttaacgttcggattgtcaatgccttcaattggtggaatcacaggtgatgagcctgttgtgacgatgattttatcaaatttttcggttgtttcttcttccgttactaggttcttaacgcgtaatattttttgatctaagtcagcttctaaaacagtgtgttgcatcttcatgtgagcgcccgcttgcgctaacatttctggatttgaatagaacattttctgaggatcggctacatggccgcccacccaaagggcaatcccgcatgataagaatgataaattatcgtgtgtttcataaaccgttacatcccaatcaggatgttctgccaatgttgcttgtgttgcaaatgtccctgcgtgtgtacaaccaataactgctactttcatcatgttacctcctagaaatatccaaaaaacgacggttaatcgttgagaatttgtgaaatattactcaaatagaacgtaactatattgtacgccacttagtttcgaaaagtcaattgcctccagctattaaattaatttcacaatctaaaacgaataaccacttatgttttaaacgttatattgtgattttattctaaaaaaggtcgttgaccacttattgaacaaacccacaaaaaaagtgctgataaatataaattcatcagcacttttaacgattaaattagatatattgtaatactttcatgtcagcatcatcgttcgcagccttataagccacgtcaatcgtgccgccacctaaacattctgcgccgtcataaaagacaaccgcttgaccaggagtaatcgcacgcactggatcatcaaagacaaccgttgcagttgtgtcagatgtcatgtggacggttacgccgacgtcttgttgacggtaacggaacttagccgtcacgtggaaatctgtcccatgatcaactggtgtgatccaagaaatattacttgcatctaattgatcagcatagagtaattcattatggtagccttgaccaacatataaaatgtttttgtctaaatctttaccaacaacgaaccatggatcattggattcgccaccgccaccgattccaagaccggagcgttgaccaatcgtgtagtacattagaccgtcatgggtgcctttttcaagaccgtcgaccgtcatcatcttaccgggttgtgctggtaagtattcgcctaagaattgcttgaagttccgttcaccgatgaaacaaatcccggttgagtccttcttcttagcagttgctaagccagcctcttcagctaaccgacgcacttctgctttttgcatgtgaccgattgggaacattgatttttgtaattgatcttgagaaagagcgctcaagaaataagtttgatctttattgctatcaccgccacgcaacatgtgcgcgatgccgttatcatcgcgttcaatctgagcatagtggcccattgcgatgaagtcagcgtctaattccattgcgtaatctaagaaagccttgaatttcacttctttgttacacatgacgtctggattaggcgttctgccgtgtttgtattcgtctaagaaatattcgaacacgcggtcccaatattctttttcgaagttgacggaataataaggaatgccaattttagaagcaaccttggcaacatcctcataatcttccgttgcggtacagacaccattttcatctgtatcgtcccaatttttcatgaaaacaccaatcacatcgtatccttgttgctttaacaacaatgctgtgacagatgaatccaccccgccgctcataccaacgacgactcgtgtattactgtggtcaaccacaatatcaccatcatttcaaatagattctagttttctacgatttgaaggtcgtgaattccagtacttaacattatagcaatcttggttaatatttcaaactaaaacactcacttttcataagttaaacgtaaaaaaagcagtttacctatcaaactcctggtaaaccgctcttaaaacgttatttagccttctttaattaacacttcatgtgccactaagttagcaataataaaattaaattgttcgacgttttcagcattcttttcactcttgaaaatatcgactggatgtaagccatctggagaggtgacagacatcttcaacgtctgtaactctttaccaattgtcatcttcaacttaatcgcactgttaaatggtgaattaggatctaatggccgttccatctggaagttaccattgtttgtgggcacaaagccaacatctcttaatgtgtattttttaacggcgggattgagtcgatattgcaccgtactccccaaaaccgttgctgttgtttttaataaagccatctgcctaacctccatacactgaataagtctattttagcacaagcacgtaaacgctgcctaccccttagcggcttgctttgctaaattgcgtttcacaatcttcgtgagcgcttcggcaaaagcagcgacgtcttcgctcgatgtttcgtgaccaaaactaatccggatgctttcggcaacgcgcgggctatcctcaccatacatcgcgatcaacacgtgtgagggttccaaatcgccagcagtacatgccgaaccacctgaaattgcaaagcctgctaaatcaagattcatctgcaagacataggttgaaacacctttaatccagaggttcacaacatgcccgacttgatcagctccttctgcgttcagcgcaaaatcaatgtcgttggcttttaaatcagctagtaattgctgtttgaatccagcataccgtgcttgtaggtctgctttaaccgctggggtcaataattcaactgctttcgcaaaaccagctacagcgggcacattttcagtccctgcgcggcgcttcttttcttgttcgccacctaggacaaatgatggtaaatgaatcgcgtcgttgacatagaggaagccgatttgcttaggtccattgatcttgtgggctgaaactgccagtaaatcgatattgtcagcttgcacatcgatatctaataggccatacgtttgcgtagcatctgtgtggaaccaggcgtttgagtcgcggacaagttcaccaatttcgtgaattggcatatgactgccgacttcgttattgcccatcataatcgatactagaatcgtttcgggcgttaaagccgccttcaaatctgcgagatcaatcaccccttgttcgttgacgggtaagtaaatcacatcaaacccttgcgtttctaaataggccatcggttttaaaacggaatgatgttcaattgccgttgtaataatccgcttgccttctttagcacgcagtttggctgtctgaaggattgccgtgttattactttcggttgccccactcgttaagacaagctcgttatctttcgcatgaatgctctgtgccaaagtatggcggccggtatccaacaccgtgtgggcttggcgcccaaaataatgggtgctcgatgcattcccgaaatcggcctgcatctgttcggtcatcgtcgcaatgacctctggggccatgggtgtcgttgccgcgttatctaaataaatatgtttcacaatttttcgcctcattttaaaaagtatctataatagtttaacatagttcgcttttaaagcacggataaacacttttcgctaccaaaaaaggctgggacaaagataccttgtcccagcctttaaaacacttaatctcagattaagcagtcattaaagctgctttttgatctgctgttaatgattcattcatccggccactcttgaaaccagctaaatcaaccgttacaaattcaaaaccagcttgttgtaatgcttggttgatttgttcgctgtgggttaagaagtcagcaatttgtgcttctgggacttcaacccgggcgattgattcgtggtaacgaacacgaaccgttgcaaaacctaaatcacgcaagaatttttcagattgcatcacttgagcaattttggcttcagttaaggctgtgttatatggaaagcgtgaagaaactgaacagctcgctactttattccagttatttaagtttaatgcctttgctaattgacggacatcaatcttataaaaaccagctgtttgaaggacactttctgcgccagcttcgtcacgggcccgtaaacctggacggaagtcgctgttatcatccatgatcatcccatctaaaacgtggtcaaagcctttttcagcagcaatttggttcaattgtgtatagaacatcttcttgctgtaataccatgtttctggtgtgttgttggcaatgtgttcgtcagataagtagttcaatgttgttgtttcgacattcgcgcccatatcatgtgccaagtcgatggctttgttaaattcttcgtctgtgaataattctgagttagcaacgactgctaagacgttttctttgccgagtgtttctaaagccatttttaaaactaatgtgctatcaatcccaccagaaaaggcaacaatcactttttccatttgttgtaaactgacagttaacattgcttttttttcagataatgtattcattgttaaagacttctttctatatcattagattaattgttttaaagctgttaattcattttgaatccgatcggcatacaccaaatcgttgttatctaaactcttgacgatcatcaagtttaaatgcgcggcactatcaacaaagtttttgaaagttgattgactagcggtttgttgcgcgtcatcaaggctaccataaagttgttctgctgttaaaagcgcttgttgcgcttcaattaaactggttgagattgtccccggttgtgaggcatgagcagcgacttcgaataagtcgaccatcatgttttgcgtttgtttaatttgttcacgcatggttgattcctccgattaaattagatgccaaagaaactccgcataaagagtgcggcacatagaccaccaacaaatggtgcaattccgggcacgataatcccgtattgccaatctgagttggctttatttttaattggtaaaagcgcgtgagcaattctaggacccatatcacgcgcaaggttcattgcgaatccggtaggaccgcccatccccatcccaattgcccaaacaagtaacccaactgcgattggtgcaatcccaggtgtcttgatttgtgtaatggcgataattgatgaaatgaaaacaaatgttgcgaaaaattcaacgaagaagttccgtggtaaattccggataccaggtgctgttgagaagatgttacgaaccgcaacaggatcgacattgccttctgatgctttaaattcatcagcgtacatgatatagacgataactgcaccgacaaccccgcccaagacttcagcaactgagtaagggataaacattgcccatgaaacgttgcctaagatacattgtgctaacaccatggctgggttaattgaaacatctccgaagatgaataatgaaactgtaatcccaaacccccatgttgtaatggcaaataaatgacctgagccacgatactttgaacctttgaggacttcatcactgtgaaccccaaccccgaaaatgatcatgagcgctgtgcccatgaattctgctaataactgatgaatcatgaataaattcctccaaataataacgatttaatatctaaattttgatagctttaacgcgttacatcaggatagacccgactcgggcatactctgataaacagcaagataaacttgattaagtgccacgtcatgcgccttggcggcagctagacaatcgtcgaactctggactatatttttcgagatcgtcatagttcacgattttgacccgaatatcgccgaagcgcgtggctacagtgataaaatgacgtggcataatggtgcgccccatcgtctggtaacgcacaccaacagttgctgtgtgttttaagatcagataagtcatggcttgttgatcggctggatgaatcatgaccgttagcttaattgcgggccgatttttcttcatttgaattggactgaaaaaggcatcgagcgccccattgtccatcaataaatccaaaaccggcgctaaactttctgctgactggtcatcaatgttggcctccaacactaaaatctgatcggtatcggttttaacaacctgttggcttagttttttttttcgcacaacatcacgcgtaatgcattgagttgcggtgtttcccgattaccaaaaccatagccgactttaatgatcgtttgatcgtctgggattggacagaattggtcgacaatcgttttgacaatccccatcccagttggcgtgatcaattcggtctgcaagtctgggttttgtttaattggaatcgcactaccgacgcgcatttgcatcacagcggggactggtacgggcatcatgccatgcgcgactttgataaagccactcccatccgttaattcggatgaatagacttgattaactgccaataattcgagggcgacaaacgctccaacaatatcgacgattgaatcaagcgccccaacttcatgaaaatgaacatcacttaatggtaggtcatgaacgaccgcttctgattgcgcaatttctgtaaaaacttgtttggcgttcgttttaacataatcgcttaaatcactgtgatcgatgatggcttcaatgtcttttaaatgtcggacgtcatcaccatggctgtgcgtgtgtccatttgcgtgttgatgcgtgtgtgcatggccagttgcgtgtgtatgcggatgttgatgctgtgccggtgttgtttcaataaaaccttcatccttgtgcatggcttctggcaaatggacgtcaaaatcggtgccataaatactacttttagcaatccgttctgcatgtaggtggtagccagggacattcaacttagctaattctgtttcaaactgtttgaaatcaacccctaaatcgagcaaagcgccgatgaacatgtccccactaattcctgaaaatgcgtctaaataaagagttctcatttgtcatcctccgtgtcacttaaatgattgatcatacttgctgagtagcccgcaccaaagccgttatcgacattaacgacggtaatcccggacgcacaactattgagcatggtcatcagcgctgttagtccgccaaagttagtgccatagccaatactggttggcacggcaatcaaaggtttttcgatcaacccaccaaccacactggctaaggccccttccataccggcgaccacgatgacaacttgggcttggcgaatttcatccaaatgttcaaacaagcgatgaatgcccgccacaccaacatcatagattcgtttaacttgattaccgtatacttctgcagtgaccgccgcttcttcggccactgccatgtcggaagtccccgctgtgacaacggcgatatagtgatccgtggttggtagtgggtcaaccatcagcactacacattgcgccatttcatagtacattgctgtcggttccgcttcttgaatcgcagcgtacttttctggggaaactcgcgtacataaaatattttcggcatgtcgttttaacgaaccaatgatgccaatgatttggtccgccgttttaccggcgccataaatcacttccggatagccattgcgcttttgccgacttaaatcaaccttggcaaagcctaaatcatcaatggtctgcgcatgtgccagttgctttgttgcttctgtcacactgactttttggtttgcaacagcttctaaaagctgttgtagctcatttgttgtgtccaaactactcattctttctattgttatttcacaataacccctaaaccatcagggatcactgtcactttggcatctgccccttcaatctcgtaggcccgttctaacgctgcatctaaactggttgccaattccatatgcatgtctgtaattaattgtggatcaaccaaatctgacacgaaaatcacatgatgttggaccagaatccgagccaagatttgtgatgtccattgatcagggaccgtttcaagccgtggtgtattgattgcttggtctaagaattctttaggatccttaacgtcagcaatattgtgatagaacccatcaccaccatgcccgtcacgtgcaccagcgaccatgataatcacgccaccttgtttgttcgtcgcttcagcagcagtcatccctttaacggcttggtaaatattttgatcaagtggatagccaccatttgttgaaatggcgatatcacaatcgatcttgtcgacttctgataaactttcaacgaagtcacagccttttttgtgcgctgtttctaaattaccggcgaatgaaccgatgatgtgcttgtcttcatctaaaacaacgttcaagatgaattcaagcccagcttgtttagcggcataaaccatatctttgtggactgggttatgcattaaattcccggttcttgaatagtgggaattgatgaattcacctgagtggttggccataattgttttgtatgaagccacacccggtaaaacagacttccgcccgcctgagaaaccagcgaagaaatgggattcaatgaagccttcagaaatcaataagtcagcttcaacagcgactttattgataatgcaatcgccacctgatggcaattgaccgattttcacaactgagctgtcatcggttgaaacatgcatgacgatttcttcatttgcaacgatttcttcaccatatttgttaaccaattcttcgtgcgttgatggtcgatggaacccagtcgcaactaaaatccgaatccgtgcatctggtgctacagaacgaatccgtcttagtaaaatcggcgtgatgatatgtgaaggaactggtcgtgtatgatcagaactgataatcacgatattctttttccctttagccaactcttctaacttagggctatcaatgggattgtccaatgatttttcaaccgtttcggcttcgctcattggattttgatacgtagcagcttgtgaaacaagcttcccggcaaaattcgcgtctgcaatattagccgtgataattttttgatcgtaaggtaatttaatggctaccaaactataggacttcccttctcaatgctgattgaatgcttttttaaagctacgtccatagttatacagattttctgaaaaggatgcggtataatttatgaacaacatttcattattacttttaggtgtaacaaatgataacaactttatagtcttcaagacgtataatttagattaaagttatttaatgattagcagatataataaatcagcacaaagggtaggcagatgtattatggttttaacagacattgaatttttaattaactttttagaggaacgtcacgtcccagtgattaccaaaaagaagcacacatacttgacgtaccacggtttggaagaacggtatacttatattctgaaaaaaggcgtgattaaaaactcgatcattttacaagacggtcgtgaattcaatctctcttacattacccagccggatgtcatttcacttttacgggatgaaatttcaaaatatacggatcaaccgtttaacgttcgcgttgaaacagaggaagcaactttctatcagattgaccgcgtgaccttctggaactacgtgaatgccacccccgagttacagaattacgttaaaaattactatcgtaaaaaattatccgagaatatttatcgcttgcaaaaaatggtaatgaatggtaaaaacggcgggctgtgtgccttcttatacagcttaattgatctctttggtaagaaacgccgcgatggcatcctgattgacttcgtcgttactaacgaagacattgccggcttctgcggaattagctcgcgcagtagtgtcaatcgcatgctcaaccaactcaaaaaagacggcgtgattgaaaccaccgagcataaattcttaatcaaagatgtcagttacttgcttgataatatcgccaattagcgatttgttaacatatgtaaacatgattcgtgattgaaaacggctatgagacgcgtagccttaatagtcgagaacaaatcagtggaggtttttatgtatgcatattccagataattatttaagtccccaaacgtgtgccgtgcttgcagcggccgctattccagtcattggcttggcactcaagaaagttaaataccaagtcaccgaaaaaaaagaaacggtacccatgttagggatttccgcttcactatcgtttttgatgatgatgtttaacgtgccaattcctggcggtacaaccgcccatgctgttggtgcaaccctattagcgattctcattgggccgtacgccgctagtctagcggtaacgattgcactcatcatgcaggcctttttatttggtgatggtgggattcttgcactcggggccaatattttcaacatggccattatcatgccatttgtcggctatggtctctatcgactattccaaaaagcacaccatcccaaagtgggagtcgtagttggcgcatatctcgggattaatgccgccgcattaatggccggtattgaacttggtctgcaaccgctcgttgcgcataacgcagctggccaacccatgtatgccccttatccgttacacattgcaattccagccatgttgttcgctcatttattagtcgctggttgggttgaagccggctttaccctcgccgtttatcaattcatttgccgggttgcacctaacgaactgttcgttgcaccacgtcaaacagttgatccacaaaccagccgtcgcttacatcacgcgctttacagtttcatcggcctattgactatcttatcgccgattggcctattagctagtggtactgcttggggcgaatggagcgcaagcgaactcgttgcacaactcaaacatgatcacctaggtcacagtctaccaagtagtatggcccatggcttaaactttaatgccctctttagtgactacacagttgctggcgttccactatcacttggctacatcttatcagcggtaacagccgtcattgttttttatcttatcggaaaactggtgatgaatcattattcaacccaatcctaaattaccaacttggcttcaaacaacggaagctacgcccaaaacggtcgcgcaattcgaccgttttttaattcaaaatttgcgctttagtgatcgtttgctgcggcgctttaatcaaacaaaacctcaacctttaatcgcccatcaaacgcctggtattcaactgattagtttattggtgacactcatcattctcgtgttaacccatagtctacttttaatttggttgattggtttattgacgttaattcgaatttgccgcttaccaagccagcatttatggccgctttttaaacgcgtcggtgatatcagtatcattgcgattttattaattctaccgaatttttggctcggccaagtcgccacaacgcttttatttatcgtacggactgaaatcatgttattaaatattgctttctttctcgagacgatcacttggcccgcttttattgttgctttacgtcaattaagactccccagtctgctcattttgacactcgaaattagtctgaaatacagccacttgctcgcccaatttttacaagaatccctctgggcaattcggctacgctcaactggtaaaagccaccaacggcaaaatttagtcggttcactgattggccgcctctacttaagttcccgcaactacattaccgctttatacgatgcgatgattctccggggctacaccggacaagtcacccgacggacgccgctaacagtgaatcgctacgactggcgcttaatcagctgggatctagggctattttgcctattctatttcattcggaggtaatcagatgctgaatttgcaacacattcactacgcctatacgcaaaccgacagccttaacgatatttctcttaccatcgatgcaggcgaggccgtcgcgtttatggggcctaatggttccggaaaatcgacgctgtttaaattaattaacggtttgattcagcccagcgcaggccaatattattttaaagaccaacttgtcgatgcccgcttcctcaaaaagcctgcacaggcgactgccctccaccgcgcaatcggctttgtgttccaaaatagtgacgttcaattatttaacgaaacggtgcgcgccgaactcgcttttggtccagaacagatgggcttagccccagatgaagtgcaaacccgcgttgacgattgcctcgcgttgttacaaatcgaacacttagctgatcgcgtcccttatcaactttccggtggcgaaaaaaaactcgtcgctttgggcagtgtgctaacgatgaatcctgaaataattgtgctcgatgaaccattcaacggcctatcagccgcctaccaaacgctgattatccacttgctccaacaactcaatcaagccggcaaagggattttaattgcaagccacaacctggctcaagtcaaacaagtcgctaaacgggtggtcgtctttaatgaagaccatcaagtgacccatgacttaccactcgcaaaacttgaacaagaaccggaactgcaacgaactttagcattactctaaagagagtgtgttgtagttactgttaatcgcaggcatataactgatagcacaaatatgcggatatcaaaagcggcggatggcacaaaaataatttttgtgtcatccgccgcttttgcattttatattaatcgccttcgatttgtaaccatccctctgtcgcattgaccgtgattgactgtccaatcgggaagtagttcattgctgttataaccaccagtcaccgctaaaatcgctttgacattgtcatctatgaaagcagcgtgcaaatcggcaatccgcgcttcaattggactagaattgaattggtccattaccaagacatgctgcccaaacgtcacctgataaccaagcgcactcaatcgatcattcgccggttgattagccacatatccgccaacactttgcaaactattactaggcgcgatgacccgaatctcatcgccttttgataatcgtttgggcatcatctaaatacactcctttcccatcaccactatgaaacgttcacataaacagtcaattgtcggttcaaatattcggcccacttccgcatactcagccttaaaaaatggctcgtgaactgaacgccaataagcaagcgttcgatcactctcgccctctaaaaaggcatgttcagcgtcgacttgatcatacttaacaatcgtgcacattatcgttttcgtaattgcaaccggccggtctcgtccatctaaaataacattataatcccccacttgtgggacatgctcatcgggttcatacaactcaatcgcagaagtggtggccgttttttgaccgattattaccaatcgtgccaattcattggccatttgttctgtattcccaaatgaataaatctccgctggttgtaaattaggtgataactgttgctgttccgtgaattgttgccaataccgctgcacctctggtgtcattgacatcccctcttccattcgtaacgttgttgttagtttagcagaatttaaccatttaaccaaaaaaagaaacttacccattaggataagtttcttttgatattttatgcccaccgacgcatctttttaagcatcatcggatagcttttaattaggaaccattgtttcatcttaccggttgtttggtcggcacgaatcccagcaatccctttttcaagcatctgttcaaaagtgattgttggttctgtctactgaccatcaacgtaacacagttggcaatactgatttgacttggtgccatcttgttcactaccttggttttgtgcagtcagtggcatgccacaactttgacagaatttttccatgggtggactcctttaacgtgcttttcaaaccatgttcctacgtttagcctaattagccaaacaatcggcttcgccgcttattcgtctaattttgctaatcctcagaacataaccagtttgaacacacttattttcttaacgtgctttcatcaacagtttcctgcgctttgctacacttatcaaatcatcgactatgtcgctaattcgttaagttatgcaaatgctcagaagctaaccgttgatgacgcacttcttttatttaacgtgcttttcaaaccatatgcctgtgcctagcgacacaagtcaaacgattgcttgcagcaatcattcgccttgttggactagtgctcggaatatacccggtttgaacgcacttcttctttaacgagcttgaacgcacccattttatttaatattcttcaagaagttaagcaacattgctgctgatttttggcctgcttctacgatgaattcgtcaaacgttacgccggcttcttcgtcgccgacgtcgctcattgcgcgaatgacaacgaatggaatcttgaattgcgttgcaacttgtccaattgcagcgccttccatttcacaagagagcgcttcggggtaaatttctttgattgccttgattttatcttggctcgcaacaaattgatcaccggtgacaattaaaccaacacgtggttgtatgtcaaccgctttagccgccgcttcgatttgttgaacaatcttagcatcactttcaaatcgttggggttgttgtggtaattgacctggtaagtaaccaaaggcagttgcttctgcatcgtgataagcgacttcgcttgaaatcacgacgtcgccgatatgaaggccttcaccaatcccaccagctgaaccggtattaatcacaacatctggtttttcttcggctaataaaatcgccgtcgtcatcccagcttgcactttaccaattcctgattcaaccaacgtcacttcatgaccgtacaattgacctttataaaaggtattgccagcaaccgtgtgttgttgcacatcttctaattttgttaaaagcgtccgaatttcttcttccatggcgcaaatgacactaattttcatactaattctctccattctaaaaaaacattaactttaccattctataggaaaaaaagaatcaagtaaacgataataattaagccaaaggtaatcccaatcgcccaattcaaccgtttcttcattcgtttaaccgctggtggatcgactttcttagtccgacgcgttgctgtttctggttcgtcttcagtcaccgctttaagggcttctttttgttgttcacgtgcatattcacgttctgtcctgaggcgctcttgatcgcgctgtttaaaggcggcttcttcagcctctttttgttgtcgatattcttcgcgcgtcttaggttcattcgtcatttctaccgctcctattttgcttgtaattgccagtaatacaacgccataatcgttttggcatcacagattaaaccatctgcaacggctgcttgtgcttcttctaacgtcaacttttcgacgttcaagaactcatcgtcatctagcgagcgcttatgcgtgaccggcgttagtgtatcagtgtagtataaagtcattaattcatttgaaaaaccgggtgatgaaaagaaatccgtcacgtgcacgagcttttgcgtcgtcaaacccgtttcttcattcaattcacgtagtgcgacctgatctaagttcttttcacctggatcaatctttccagcaggaatttctaacgtttcacgttgcatgggggcgcgccattgtcgcactaaaaggatgctgttatccgccgtaatcggaataatgccaaccgccccatgatgatagacaatctcgcgacttgcggtttgtccatttggcagtgccacttgttgaacggcaagatcaatgatctggcctttgaataatgtttcttccgagaggaccttttctgtataatccatctgctaatgccacctttaccgtttaatcgctattatacgcgcatttaaaatcgtccgccatcgtcaatgctaaattcaggttcacggccgaattaaaaatccatccttaggcggatactcttttaccttaattcctgttagaatgaaggcatcaattaaatcaggagctgacaattatgtttaaaaaaataacgatttggtgcacaggcatgctcattacacttgtctcaatcccaattttggcaacatgctttgatatttatggtgattgggataatttcatctggttcagccttggtttattattagggctgatctacgttacaatcagccttaaacggcttaaacgacaaccagaatataaaaaagatcagcatatttcaccacaaatgctgaaacactaccaagatgctggcatgagtgatgacgaaattgactttttcagacaaacgatgcaacaagccgaagcgcaaattaaggtacttgcaaccaacatgcaagctcttcctaaattacgggcaatcgatttaaatcacgatacaaccaaggtcagccaatcgctttttcgtgcgattgtgaaagatccaaagcggcttcacaatgctggcgactttttataccggcacttaccatcaatcaatgaactgactagcaaatacatcgaaattaaccatcatgaagtcaagacagccgatacctatctcgttttagataaatcggctgcggcaattgatgcgcttagtcaacagattcaacaagactacgcggatttcgtggccgaagacgtcgatgacttagacacagaagtctccgtcgctcaacaacaaatcaccccagatcacaaggaggaagactaatgtctgaaacgcccaatccaacaaacgatttaatgaatgatttattaaaagatcctttcgaccaaagtgcgccagttgtcactgaggaagcagccccccaggcagaggcctcaattatcaataagctctcccctgaacaacaagcacaggccgaacaattggcacaacaactggacgtcaacgaccaacaagccgtcttgaattacggcgctcaagcccaaaagaaactcggcgctttctcccaaacaatgctcaaccaagtccaaagccaagaaacaggcgaaattggtgacgcattaacgtcattgatgtaccgtttaaacgaagccaatcctgacgaattacgcgccgaagacagcaacgttttcaagcgaatgtttggcaagattaagaagtcggtctatgaaatcactgcgaaatatcaaaaaattggcgcccaaattgatgggattgccgttaaattggacaaagaaaaaaatgcattaatgcgcgacaatgagacgcttgaaacgttgtatgcgaagaataaagcctacttcgatgcactcaatatttatattgctgctggtcagttgaagattcaagaattagaaacaacgacgattccagaagccatggaacgcgccaaaaatgacgataatcaaatggtcgtgcaagaagttaatgatctcaatcaattcaagaaccgcttggaaaaacgaacttatgatttagaattagcacggcaaatcacgttgcaacaagcaccacagattcgcttgattcaaaataccaaccaagcattagctgaaaagattcaggcttccattaacacggcgattccactctggaaaaaccaagttgccatcgccctcaccctgctccgtcaaaaagatgcggtcactgcacaacgacaagtgtctgaaacgaccaatgacctcttgaagaaaaatagtgcgatgttgaagatgtcttcaatcgaaaccgccaaagaaaatgaacgcggcgtcgttgatatcgaaaccttacagaaaacacaaaatgatcttgttgaaaccttacaagaaaccctcaagattcaacaagaaggccgcgaaaaacgccaagtggctgaaaaagaactcaaccacatggaaaatgatctgcgcgaacacttattggcctatacccaaggtcaaaccgctgctaacagcggaccaaaagaagttaattaaatccacaaaaatagcgccgcccatctttttgatgagcggcgctatttttgaatagttaagctattttgcgatgtttcaacatccgccaaccggttagagccgttgcgattaaacaaatcactagcgcaaccataaaggcatcatgcatcccagcgatgaacacattcgcgtgacctggaatataccccgtcactttttgcccgtaattgcgactcattgcggcatataaaaccgtcgttgacaatgaaatcccaaagaccatcccaagattccgcgcgagggcgttaatcccgccagcaatccctagatcttcaacaccgacggaactcatgacaatcgtgttattcggtgcttggaaaatcccattcccaagcccaactaagccaacgaagaacatgaataaccagatcggtgtttgtagattcatcaacatataaccgacctgactgatcgaaatcaacactaacccgataaaggttaacatttctggcccaattcgatccgagatactcccggcaatcggtgcgaccaccacttgaacaattgggaaaatcattaaactgtaaccggcaagattaggcgctaagcctagcgcattttccagatagaatggtgaaatcacattgaagaagaagttaacgatgaaaattaagaacgcacagagtaaactcaaactaaaatcgatatttttaaacaatctaaacgataataatggctgttctacatgttgttcaatccaaacagagatgccagcactaattaaggcaacgacaaaggccgctaaaataattggtgaggtaaatccaatttgttggccgatgaaaatgccgaggaataaactaacaattaaaactacaaaactggcaaacccagcatagtcaattttttcatgtgttttaacaatatccttcggtaaaataaaatgcccaaaaataatggttaaaattccaattggcacgttaatccagaaaatatagccccaactaaaatgcgctaagattagcccaccaatcccgggcccggcaatgctacctaacgcaacgaatgatccggttaaccccaacgctcgcccacgctctttcagtgggaaaacctcggtaataatcccattattattgctcatcgtcattgatgcccctaaagcctgaagaacgcgtgcacctaataacaatggtaagccgccattaaagccacacaacaaggaaccaatcacgaataagaaggttccaattttaaacactttgaccttcccaaaagcatcgccaattttaccgaataataataataaggcacaaatcataatcagataaatcgacacaatccattccgcttgattcatcggaatctttaaatcacggctcatgactggaagtgcaatattaacgatactgccatcaagcgtcgacatgaaggtaaatagtccgacagccgtcaatattcgccaacgatttttttgaacctgcggattatccacataacttaatgccatctgtgagtcactttctttcttttaagtttactccgtctattataccgtggttttagttaactgattaaatcttaatagttgaaaaatatttgctatactacaattatttattattaggaggtattattttgtccccaaatcaagccttttttctcactgttattggttgcctgttagctatcagttcatcttattttatcgtgcgtctcaatatgctaaagccaacactcaagcaaaatttcttggaccaatatcctgacacggatgaccaagcttacaaagtgcaacaatcaatgaaacaagcttatttcaacgcatccttttacaagcaagctgttcctttaacatcttggttagtccttttattctttttatcaatcggtggctgtctaacagcgctctatctagatgccctgaacattgcaatccgtcttttggggagtgcattcatttttatcgcgtttctctaccttaagttgccgacttttcaagcacagcatactttttggaaagcctatctacaagcgcatcctgaaaatgaattaaaagtcgtcatactcccactcgattcacccattcaacagcggcggattgccttactcaccaaatttaaatgttgtactcttgtagcaggtctcatattgttttacgcctctctttttctataactcaaaaagcggcaccaaccattttatggttggtgccgcttttttaattaacgaatttcaattgggttcgttggttggtctgattcacttaacttcggtaacattaattgtaagacgccatcttgatattgcgcatcgatttgatcccggttgacaccaggtaggtagaattgccggctaaagcgcccataatgccgttcgctttgaacgatattgccttgactgtcactatgatcagcgaaactatcacgtttagcactaatcttcaatgtattatcttgataatccacgtgaatatctttcttgtccagtcctggtaaatcaaccgctaattggtaatccttatcggtctctttaacatctgttttgagtaagttgtccgtttcaggcgacattgccaataattgctgaccgaaattcttgaaccaatcatctccaccaaaattatctagccaattttgacgaccattcattaattcgtttgccatctctaaaacttcctttcttaatctttacaactctattctagtccgttaatcatgaaatgcaagtaattagcattcgacgttgttgagtgccaatttttaaactagaccactgatttttcagctttttgatacccgcctaatatggttttgtgctatacttaaggttccaaaaatattcggaggtaggttcatatgaaaattgttgtcttagcgggcgggcgtagtaccgaacgtaacgtttcattaacgtctggacacaaaattaccaatgcattacaaacgaaaggccatgacgttgctttcgttgatcttttcttaggaaatgatttgcacgacgtcgcatcaatcgatgatctttattcttcaacacctgttgaaaaagattacgacatcagcgacgaagttttaacagacgacgccatcaacgcattacgtactgatggttcaacacaactctttggcccgaatgtcttagagatttgtaaaactgctgatattgtcttcctcgcacttcatggtggcgatggcgaagacggtaaagtccaagcggttctcgatctctttggaattccttataccggtagtgacacactcgcagcaggtattacaatgagtaaaaaggtttcaaaggaaatcttattatataaccaaattccaactgctcggtttgtcgctgcttatcgcgaccaacccatgccagaaatcccatttgagtaccctgtcgtggtaaaaccaagtaacggtggctcaagtgttgggacgcatatcgtgcacaacgaagctgagttacaaccagctgtcgaagatgcacttcgtttcgaccgcgaggctttaatcgaagaattcattaaaggtcgcgaattctcacttggcgtgattaatggtcaaccattacctgccattgaaatcgtcgttaatgacggttggtatgactttgagcacaaattcgtgactggaaataccactcaatttgtcacaccaccaaacgatttacctgatgatgtgcacgaagccatgaaacaaatggcacttgatgctatgcaagcacttggcttaacgaactacgcccgcatcgacttcttctggagtcctgaaaatggcttacacgtgatcgaaggaaatacattacctgggatgacgccactttcattaattccacaagaagcagaagtgcttggtatcagttatcctgatctttgcgaaatgattgttcaaggtaaattagaactccttaaagcaaaatagccaataaaaataaccctgtcgacgattttcagtcgacagggttatttttatttggttcatttaaaactgattacttagttcctgattaggaactattcttaaaaaaacacgtcgattggaattcccaagcggtcatgtagtaattgaatttctttgacggtaaatggaatcttccctctaatcttacgattagccgtcgttaatgttttgcccaatacatcagcaacaacttgctgtttcaaatcatgaccctttaaataacctgatagaacaaataatttttctgccacattcagcacccccaagaaacgttatcaatcccgttccacattaggaatattacgataatgtaagaactctgtcaattaaaaactttagtcccaagtgttcacttattgacgtcatttgtcatataattaaacttataagtcaaacgcgtgataaaggacggtgctaaatgttcggacaattattacacgataagcgaactgctaagaatctaacaatgcaacagctcgccgatctactcagcgcaaaatataataccaagattagtagctcaatgatcttccggtgggaaaaaggcgctgccccatcactaaaagcattatttattgttgctgtcgaattgcaaatcgaccttaaccaattggccacccttgttgcggattctaaccgcgtcaattagccgcttttttttgtttttttcccgatttttgaatggtcttcacacctagtacatctaaaaagaacgtaaagattggtaatccaacaattaacccccaagttcctaagaaacgttctgctacaaataaaacaacaaatgtaaagaaaattggcagctgtgttttactcgacataaatcgcggattcaaaacatatgcttctagggcatgaatgactaaaatcatcaccaatatataaaccacatactgaattccgccgactgaaaaggcgataatgcacaatgggatacatgaaacgatgactcctgcgaccggtaccatcgacaataggaaaatcatgatggctaaactcggaatattaggcattttcattaccgttaacgtaatcgttgttaacactgtattcacaattgcaatgaagatttgggcttcaattaccacgccaaaggtattcacgaattttttagcaaaatacatgatatcttggaagaaccagccgtaagtactcttcaaaaagagttttccaaactgcggtaatcggtctagctcaattgtgtaaaagaaactcaaaataaacgataagacaattgtgacgcccattgttccgattccggtgatgtaattaacgattgttgatacaccgtgtttcaactgatccgtcaagttgaactgtttcatgtaatccccaatggttcgcataaattgattcgcatcaaatgatggactttggtagaaattatagacactctcgcctaatttaattgactgtttagcaatctgtggcacataaatcgttactgctagatacactaaaaaaatcaccaacatataaagcggcacaaccacagctgcgggcggaatttttgaatactgttggacctttcgtactaattgagtcactaaaaaagtaaagatgaacgtcagcaaaatgatattcatcatcgagcgtgacacatagatgaccccaatcaacgttaagagcactacaactcgtcttaactgctgattcgtcacaaatttttgatataaactcacgcaactttcctcctatggcaattctatatcattattttacaacacttcgaactaattggatattctggaattccgatagttgcgacttacatctttttaaaaatagtcgtatactactctggtacttcaaatttacacctagaaaggattttcggtatgttagaaaaaactttttataagaaactactacaacactcttttgatttccctgttactgtcaactattgggacggcagctccgaaacctatggttctggagagcctgaagtagcgattacttttaaaaaagcgattcccatcaaacaattgtccagcaacgcatcattagccctcggcgaagcgtacatggctggcgaccttgaagtgacaagtaatacaacagataccccacttcaaaaactattaacggcggcttacactagcgcagacagtttcatgcgtaatagtcgctacattcatctgattccaaaacaatcgcattcagaaaaggcaagtaaaaaagatatccaaagtcattacgatttagggaatgacttctaccaactttggttggataaaacaatgacttactcatgtgcttattttgaaaaaccaactgatgatttagagacagcacaaattaataaagtgcaccatattttacgcaagctcaatccacaacctaaccgaacattgctcgacatcggctgtggttggggcaccctcatgttaaccgccgctaaagaatatcatctcaaagtggtcgggattaccttgagtcaggaacaatatgatttcgttcaacaacggattaatgacgagggccttagcgatgttgctagcgtccaacttgttgactatcgcgaactcaaacacgccccattcgattacattaccagtgttgggatgtttgaacacgttggtgaagaaaatcttggtgcctacttccaagatatcgctgactacctcactgatgatggggttgccctccttcatgggattacccgtcaacaaggcggtgcgcgcaatgcctggattaataagtatattttcccaggtggctatgtacccggtttagttgaaaatacacaacacattatcaatgccggactacaaattgccgacatggaacccctccggcgccattatcaaaaaacgctggaaatctggactgctaattttaacgcccaaaaagacgtcattttaccaaaagcaggtccagaattcgtccgcatgtgggatctctatctccaagcatgtgcctcatcgtttgaatctgggaacattgatgtcattcaatacctcgtatcaaaaggccccagcgcaagagacctcccaatgacaagagaatatatgtatgattagagtgctgactgtcgcgcttagtcattgagcattaattcaaaaataacataaatccaggttttaggatttatgttatttttagattaagcggaaattactgcgacaggaagcacgtttagagtgctgagtcgaacgggttggctttgaggattaacaaaaaacgggtattatggtgatttttcagccataatgcccgtttttaggttaaccggaaaaggcagctcgaggaagcacgtttcaaatcaaagtacctgattctgcgggaaagatatggcagatgaaacccgttttcgttagcgtgctgactcaaacgggttggctttgaggattacccaaaaaagacccgctaatcaacaatgattagcgggtctttttttattgccttattttaaaagcgcttctgccttttctctaacttccgcgtcgctcatcttaagatagggtttcattgcctcaacggttttatccgtgttccggccgttggcttccatatagtgatcccacaaagcatcacggacgattgtgttatcgtcactccaatcaaatgcttctgacatcttcatatctaaaaccaatgttttttcaacagctgctgccatattaaaaacctcccatttcttttttacaactctaatgataaacctcttttgaaaaagtgtaccaaaatacgcacttttattttttagagtcctgttagtaggtttaaaatcacgatttggctaatgccaattgccaagacaacatgggttaagatttcaaataataaaatagcatagacgcgatcaaaagctgcccatcgagtttgaaataaactaatcccaaccgcaatgttcaaactgacgtacatcactgcaaccatgattaagacgaaccagatggcggtcatcccgaaacatagagcagccaacagcgcagctaatgctaaaataacggttatcccactgtacgcactaatctccgttagatacgcgcgcaaggtggttgtcgtcttcttcaataagtaacgcttgagtaaaaatccgattcccaaaacaaccaccagaataaatagttgtccaccgagtgccttcatatcaagcggtaataagtttagccgttggcgcaagacaatttgtgacgccatcaccccagcaaccgcaccaatttgttctgaccaactggcaatgagcaaacttgccgttgcagtattcattaatataaccagaccaaacgtgactaagccaaaccacaggttggcccactgccattgcacctttagcggttgttttaaactccgcgctaaaaattgatagtattgttgcaggagcgatgtttgctgttttgtttgcgttgattggtgcactagaccgcaattgggacattggtgcaatttacgcccatatttaatatggcattgtgtacattctatcattcgtctgatctccaaatacttaatttaccgtacaactgtgactgaacatggcgcgtatttcgctaaatagctcgcatgtgtcccgattaaatgtttagatggtttcgtctttgaaccacagatgaccaagtctggttggaaactaggaatcacttcttcaacaatcacgtgtcctggattaccttcatttaaaatcggcgtcacatcttcaaccccgaattctttcgctttttgaacataaacatctagatcggctgcgatttcttctcggcgcccttcaaccacgtttggtgagagtgattgataaatgttcaaatcgccggtttccaaaatgctgacaatccctaatggaatttgataggccttagcaagcgtacaagcatagttaaaggcccgtttggatgaggttgtgtcatcatcatcgatagcaattaataatttttgatagtgcattgattcaacttcgatatttaattggcgtttttctgtcattagttaagactcctcgtttatttaatcaataatgcttctttggcatgaattaattccgtgattaattggttgactggggtcgcaatgtgcttttcggcgcctttgcgtgccacgtaaccatttaagtaatccacttcggttaagcggtgatgttgcactaaatcctggtgcattgaaggataatgaccacctgcttgttctggtgcaaacatcttgctgatgtgggcaatcgtcgtgggaatgtctaattcaacggcttctgttgcagcaaccgctgagaattccgccacaattgaacgcaagagttgttgcgcttgtggggtttggcccaattgtgcaatattacagtctaacaaggcacacaagctgttcagtgtcccattaacgcaggctttacgccagattgaaaagagtacatctgaactatattgcgcatttaagccagccgcactcaacaaggcaactaatgcttgtgccgattctttgccatctggatcaacattttgtaattcgacattcccagagcctgttaatgtaatcgcacctggtcccgttaaccccgccgtccaaagtgtaatgccgacaaaaatattttctttgggcaggtattgttcaatcgtttcgggatgcccgagaccgttcaataaacagactacttttgtcttagcaccgattaagggtttgatggcttgtaacatgtcgactagctgcatcgattttgtgaataaaataatgacgtcttgaacttctttaatatccgttggcaaagcagccggaattcgaacctgaacgggttcgtgccccgcttctacaaccgtcaggccattggtattgattgcttgaacgtgttctgcccaattatcaagtaacacaacatcatttccagctgattgtaacatgtaaccaaaacgactgcccattgcgcctgagccagcgattgcaatttttgtcatagattataaaagctccttttatgatttgaattctttttaatcatgccacatttttaagattttttcacccgtaaccgcttaattcaacttaaaaagaagctgtcaaaccgcttatagcagcctgtcagcttcttaaaataggaatttacgccttcttaaaattaattgatcaatcaataataagaccaagctataaccaagactcattgcccatgataataaaatatcaactagcgaaatgtgtcccaacgtgttgaagagttgcgccatggtcgaaacgggtggcaaaatccccagaatatagaggtagggatgccagtaattgacaatcgcttcacctaaactgccgagaaccaccatcaagatggtcaacgtaccggccatccggcgattcactaaaattcgccgttgccagaacaaaccggtcattactgaaacaggtaaaatactcgtcaacattaaggtcccgcctagccaatcccaccagctaagtcctcgaccaaaagcgtggtgcccattgagcacgtaagtaattgccaagcttcccatcccaattaggacaaagaataatcccaacaagatgagatagctaattaaactgagataaaaacggcgttgcttctttaattttaaaattaaaagtttttccatttgaaggggaaattgattgatgtaactgtaggtcaaccacgtcaataagataaacagtgtcattaataatgtagcgaggctgccgacgaaatcttgtggttgcaccgcataattgactaataaggccactatccaaaatagcaaaggcccccacaaattcccattatcaaaaaccattttctgatgcaaacgtaactgtgcactaaaggacttcataacgtaacccccttaggctaaagccactttttaacattgcttgaattaattcatcactatttttgatatttgcatacaagacgacgtaccgcgtaccatcaacaatttttaaagctaactgttgtaaagtagcgggaagtgcgagtgatcgcggtgtagttgcaaattctaaccgcatcaccttttcttccggctgcggtaattcttcaatcggcaatagccgcatcgcatctagttcataaatttcagtagccaactgttcgattaaaaaagcgttgttagtgccgacaatgatggcgccccctttttggcggtagtctttcaaccaatgaatcatccgcatctgggtcgttccatcttgaccagccaacggttcatctagcaataaaatatctggggtccgcaaaatcgcctgcacaaagttcactttttgcagactaccgcgtgacaattgatttaacggtgtattaagtgccgccgctaacccaaattcataggctaattcattaatctgaccttctaaatttcgattgctaaactgatctaattctcctagcatccgcaaataagtcttaggtgtcagtccatttggtgcgagttgttcagccatatagccaatccgcatcttcggtgcaatctccagtgtcccgcgttcaatattcgtcaatcctgctagtacgttaagcaacgtggttttccccgcgccgttttgcccagtaatcgcgatacaagcttgccgatcaatccgtaaattgagacgtttaaaaagttgtcgccgctgatatttttgcgaaaaatcacgcaattctagcactgctcccatttaacttgccaacctttactggattattttgcttgccaattagcgatgttttgcgcagccaaagctaaactcaacacagcatctttagacaaatcagcttggattaagttatgtttaacggttgcagccactgcaccaatgacagccaaaccatatgtcaacacttctaaatcgcgtttaacgagatattgatcttcataaacagcttcgtggctgtattcaaagttgactttgttttcagctaaaacaccatccacgtgggtcaccataatccgatcggtcacatcgattaataatttgtggtcatctgataacgttaatttatgatctgactctgattgataatatgtttcttctgtaatatcaaaatacttaacgaccgggttatttaaaacgccaaaatcatccaaaacagcaaaaattgtttctggatttaattgcactttgcgatcggcaattgctgccatgttttcttctaaccaatctgctaattggcgaacattatcctgtgtcatatgtgggactcctttaattaatctaaatgaattctatccctccataatacaccatccgcaatattagcgcgactgactgcaccaaaaagttactgtgacatcagatgatcatcaattacgccagctccttgtaagaatgaatagatgacgactggtccgacaaattgaaagccccgccgttttaaatccttgctgatttggatcgatagctctgattttgcggggacatccgcccaagttcggggccgatttacaattggctgtccatcaacaaagccccatagatactgatcaaagcttcctgcactcttttgtaacgcaaggacggcttgtgcattattgaccgttgcattcaacttagcacgattgcggataattgccggattggtcagtaactgctcaatttcggttggtgtcatctgcgctactttggcaatttcatagtctttaaatgctgtccgaaaggcagcacgcttatttaatacagtccgccaactcaagccagcctgatacaactccatacataatagttcaaataagcgttggtcatcatgttccggttttccccactctgtttggtaatacgccaataactcaggtgaatcatacatccaatcagcttttgtcattattaccacctcctaaattgaactacgcaaaaaggctaaaaagaattcatcctttttagcctttgggattgttatttattttttcttacttgctttttgataagggcgattttcaacatcagtcttgacgattaacacgtcacagatagctgtgcggttaacatattctgtcacagaacccatcaacatccgttcaactgcattcaagccagtagagcccatcatgattaaatcggtttgatattctgtcgggaagtcgcgtgcgataacattcttaggattaccaaaccgcacatgaatctcgacatctttcaaaccgtcattggtttggatatcatattttaaactgttgagataattctgtgcatcttcagagatttggaaaatagcgtctcctgaaagcatgccactataactccctgcaaattgcttggtatccaaaacgttcaaaatatccaagcgcgcctgattcatcttagcaacccacactgctttatttagtgctaattcagcttcttcagagccgtcaactgggacgagtattcttttatattcttgaaccatgttgttcatctcactttctctatatgcacctgttacactttaagaatataccgcttggaaaaacaattcaagcaaaaaagcgaagcgcttccgcgaacatttaattagaagtagtctttcttttttaaccaccaaccgacacaaaggctaatggctaatgacaatcctaatagcacgagaaaccctaacttactctcggctagcgggaccggtacgttcatcccccagaaaccacctaacgttgtcggaaccgttagaataattgagagtgatgttagtgtcttcataatattattcaatcggtttgaaataatatctgaaagcaaatcacttaactgtgccaataactcacgatacgttgtaatcgccttatcggacttggcaaactgcaagtcaatccgatacagtaagtctgtatgtcctgacacgcgctcaaataatggagttgccttaatttgcggaataatttgctggttactcttaagccctaaatccaaatagacaacactctttttaagagacttgagtgcatacaacaaccgattgcgtgtcgaaacatgtacattttcttccaattgttcaatctgttgcgcaacgaccgctaaagccgctaaataacgttgatagatggccgaaacactctttagagcaaccgtttcaatttgaccatccaggccttctaacgtgagtatttcatcgatgagctcggactgttgatgccccacagttaataacgtctggccactaatgattaacgaaaaaggccgcgtaatatattccgcatgatcttctgaatcatgggttttaactggtaccagtaaacaaatatgggtcaatacttcaccggtgtccgttgtaaatgtttcataccgtgcgacttcattgatatcttgggccacctcaaataacaccgctggtaagtggtattttttagcgaaatggtgcatctcatgtttagttggtgcttcaaaatgaatccagtcggcacttttttcagaggttccttcaaccaactggccctcaggtgtcatttcaaaatacgtaatcatctgctcactccactcttaatacccctatcatactgtttctccccacatactgacaagttaagttgattgcccattaaatatgctacaatattggtatcattggataaggagttgacgcatatgacacaccgcattttgccacttgaaaaaggccataactttagagaattgggcggctatcaaacaaaagacggccggacccttaaatggcataaagtcttacgttccgctagtctagcccacctaacaccacatgatttagcttatttaactgattatggcgtgcgctatgatgttgattttcgctcacctgaagaaactgccaagtcaccagacaaggtccctgccaatgcaatctatgaatccttacccgttttcaaaattgatgaaacggctagtacggcatcagaagctgatctttttaaaacgttcagtgctgatccaaaaagtggtcatgaacatatgattcaagtctatgtcgacttaattaaccaagatcactccaagcaagcttaccggcaatttttcgacttgttgctagcaaacgataaggaggaccaatccttactgtttcactgcacggctggtaaagatcgtactgggatgggcgctgttttcttgttgagtgcactcagtgttccagaagaaacgattcgcacagattacttattaacgaatcaagcttctgccgctttcgtgacccaatcgcttgcaaaactacaacaaaaaacacagaaccagtctgtgttccaaagttatcagtcattactaacggttcatcaagattacctcgataccgccaaacaagcgattgaatccgaaaatggttcgttgcaagactatttatcacacgatctccagttaagccaacacgacttagctgacctgcgcaaaatttatttagcataacccatttgtttcacatgaaacttaaaaaaggagcgtggctttgaatgcccactttaaaagaacaagtgattgaggcgagcaaaaccatcggcatcgataagattggtttcacatcggcagcgccttttgattatttagaagcaagtcttaaggaacaaaaagcaaatggtcattcgactggattcgaacataaagtgcttgaagaacgcctttatccagatttaattttcgaccaacctaaatcgattatcgcgattgctcttgcctatccaacaaaaatcatcaataagccagcgcgaactggtgctaaacgcggtagttttgcccgcgcttcgtgggggattgactaccacgatattctgcgcgataagatggaccagctgatcagcgctatcgaaacacttgctgattcagatactgaaattacttttaagccaatggttgatacaggcgaactgagcgatgtggctgttgcgcaacgtgctgggttgggcttcatcggtttgaatggtttattaattacacccgaattcggttcttatgtctatcttggtgaaatcattaccaacatcccatttgaaccagacacaccgatggccaatcaatgcggcagctgtacgcgctgcatcgattactgtccaccacaggcattaatgggcgatggccgcctcaatgccaagcgttgcttatcctatcaaacacaaaccaaagggttcatgcccgaagaattcagaccaaaaattcgcagtgtcatttacggctgtgatatttgccaacaagtatgtccgtttaataaaggaaaagacttccacttccatcctgatatggagccagatccagaatctgtgatgcccgaattacagcccgtgctaaccatcagtaacaagcagttcaaacttcaatttggacaccttgctggttcgtggcgtggcaaaaagccacttcaacgcaatgcgattatcgcactcgccaacgtgaaagaccgcaccgcgattccgaagttactcgaactcatcgatactgatccgcgccctgtcattcgcggcactgctgcttgggcgctcagtcaattagtgcgcgatgtcacgcctgaaattttagactttctagaaacagccgcaaagcgtgaagaagaaccggaagcccaagttgaattcgacaatgcacttcaaattctaaaagaacgttattcagagaggtaggtccaccctagtatgtcagaaagtgctccgcaaaaaacagtccttacgcagccattaatccttttgatggcttttattaccggcgttgccgtctccaatctatattacatccaaccgattcaagcactcgtagcgaccactttccacgttacaagtggtgcggtcgggactgttgcaatgttgacacaggtcggttatgcacttggcttgttgctgattgtcccgtttggtgatgtgatgagccgttaccagctcatattacggatgcttggcttatccttactatccttattagccgcttacctagcacccaatttcattttctttgccttgactggtttgatgattggcctcacctcagtggttcctcaaatcatcattccatatgcagccgtcctcgctcaaccacaaaaacggggcgcagtgctcggcaccattctcagtggtcttctaatgggtgtgctcctatcccgaagctttagcggcattattagtagttacattcattggcgttgggtgtatctcatcgctacaattgcgattgcgcttttaatccttctggcagccctcaaattacctaaggattcccgtccaaaaaacgggccaagctactggcagacaatcagttcaattccagggcttatcgcgcaccagcggctgttacgggaagccgccatcaacggttttttcatgtttgggacacttagtattttctggtcgacactcattttctatatggccagtcccgcctatcgtctcggtagtggtaccgttggtctattagcaatccttggtgcggctggtgctttagctgcaccaattatcggtcgcttagccgatgctaaatcacctcgctttattatcgccactggcttattcatgatgaccatcagttatcttttattcttattctgggggcatttcatgccgattctaatgctcgggattgttttattagatgtcggaaaccagtgcggtcaggttgccaatcaaacccgggtccaaatgcttggtgaagccactagtagtcgcaacaataccgtcttcatgtttgcctatttcatgggtggtgcttccggttcattctttggcgccctcgcttggagcttcggtggctgggtcgccgtttgtctcttagcgctagcttatcaatgtctcgctttaatcgcccactttattctttatcgtcctaaatcaacaggttaattaatggccggtgtaacgttctcaattccgttacaccggctttttgatacctatcagtaaagcgtattcattgacagttgcatgttacgtatctaacatagttattatatagcaataaatttccaatcatcacaataggaggttccttatgacacattatctaacgtttgatcacgtttcaaagctctatcgcggtggtaacaaagccgttgatgacatcagttttactgtcgacaaaggcgaattcatttgtttgattgggacgtctggttctgggaaaacaacaaccatgcggatgattaatcgcatgattaacccaaccaaaggaacgattaccttagatggtgaaaatctcgctaatgtagaccccgttaaattgcggcgaaaaattggttacgtcattcaaaatattggcttaatgccacacatgactattcaagataacatcacaattgtccctaaactcttaaaatggtccccagaaaaacgccatgcaaaggcgctcgaattactaaaattagtggaaatgcctgcggactttttagaccgttacccaagccaattatcaggtggacaacaacagcgaattggggtgattcgcgcacttgcagctggacaagatattattttgatggacgaaccatttggtgctctcgatccaattacgcgtgaggcacttcaagacttagtaaaacaacttcaatcagaactcggtaaaacaatcgtctttgtcacccatgacatggatgaagcactcaaattagcgtcacgcattgccatcatggataacggccaaatcatccaaatgggaacgcccaatgaaatcttgcgaaatcctgccaaccaattcgtcgaagacttaatcggtcacgatcgtttgatcgaagccaaaccaaatgtcgaaactgttggccaaatcatgcttaaaagtccagtcgctatcacaccaggtaaatcattagttgatgcgattcgcttaatgcgccaacgccgcgttgataccttactggttgtcgacgaaaaccaacatttaaagggactcgtcgatattgaaaatatcgaccatcattacaaagacgcaactagtgttggtgacattatgtctaccaagattagttacgtgaacgaaaatgatttggtccgggataccattgaacggattcttaaacggggctggaaatacgttcccgttatcaacgatgatcatcaacttgttgggattgtcacccggacagccctagtcgatgtcgtttatgatgctgtctggggtgatactgacgaatctgaagcagaatccgaccaacaatagaaagggaggaatcgatgatgctcacttttttaacagaacatggctctgatttactgattaaaacttgggaacaactctacatttccgcaatcgccttagttctgggcataatagttgcggtgccccttggaattgccctcacccgatttcctaaaactgccaaagtagtgattgccattgccagcatgctccagaccgtcccctcattggcactattggctttaatgattccgctctttgggattggcaaagtaccagcaatcatcgccttatttatctactcactactccctattttgcggaacacctacatcggcatgaacgatgtcgatccgattctaaaagatagtgctaaaggaatgggcatgacgccggtacaatcaattatgcaagtggaaatcccaatggcgacccccgtgattatggcaggaattcgcctatctgcggtttacgtgattgcttgggcaacccttgcttcatatattggcgctggtggtcttggcgacttgattttcaacgggttgaatcttttcaaaccggatttaatcatcggcgggacaattcccgtcacattgttagcattgctagtcgattttggcttgggccggttggaaaaacaactgacccccgctgcaatcagataaggaggctcctatgcataaaatacgccgattcattacgagttgcggattattagttggcagtctcctcctgttaagtggctgtcagtcacttggcatcggaaaccgtcaatcacaaacaattcgcattagctcttcaagcaccactgagtcacaaattctcgccaatattctgagcgagttgattacccacgaaacacaaaataaggtcactttaattaataatctgggttcttcaacggtaacgcatgaatcactaattcgtggtgacgccgacatagctgctagtcgctacgctggaactgaacttactggtactttaaaaatgaaacctactaaagatcctgaaaaagcccaaaaaatcgttaaaaaagctttcaaagatcgttacaaccaaacatggttcccttcctacgggtttgcggacacctatgcctttatggtcacccaggaaaccgccaagaaatatcatttagaaaccgtcagtgatctcggaaaagtggcggatcaactaacagctggtgtcgattccgtctgggtaaatcacgaaggcgatggctatcccgcatttaaagaaacgtatggctatgatttcaagaaagttgcgcccatgcaaatcggactggtttacagcgcactggcggctggtaaaatggacgtcgttttaggttactcaaccgatggacggattaaaagttatgacttaaaagtcttaaaagacgatcgccgcttcttcccaccatacgatgcgagcgtggtcgccactgatcagattctcaaagaacagccagcactagcgccccttttacaccgtctagatggcaaaatcgacctcgacaccatgcaaaccctcaactttaaagttgataatgatctactagaacccgcagtagtcgcaaaacaatttcttcaggaacataattatttccggaaaggagccgctaaatgactaatttaaatacttggcaacaacttgtctattatttccagcataatggcagttatgttttacggcagtttagtcatcattttttgatttcgatttatggcgttttacttgccgcgttgattggcattcccttggggatttttattgcgcaccggaaaaagctcagtaatgttataattggggtagcgaatgtcatccaaacagtgccttcactcgcaatgctctcaatcattatgcttggcttggggcttggcacacgaaccgtcattgcgactgtctttttatactccttgctcccgattatcaaaaatacttacaccggtatggagaatgtttccgataatattatcgattccggaatcgggatgggcatgacaaattggcaactgttacggatggttgaacttcccttatcattggccgtcattatggcggggattcgcaatgccttagtggtcgccatcgggattacagcgattggcgcgtttgttggtgccggcggtttaggcgacatcattattcgcgggaccaacgccactaatggcggcgccttaatcttagctggtgccctgccaaccgccctgatggccattatcgctgatgtgacgttaggctttattcaacgccacttagaagctccacaagcacgaccttaaatctcaacattaggaaggtgtcactatgaaactgtatcaagcattaacccaagtcacactaaacacacaaatggttgacgatttacctgattttcagattacaaccgttttagaccaaccattgaactttgcccctactcagctttaccattatatcgatgccgttttaaagagcggttctcgtcacgatgaaaataacctgttatatgtcacagacgcgatttttatcactgaaaactacaactttaaacaaactgaattcgcggcacttgccacaagcttcgaagaacgggtaacattagcgcgtaaaattgtggccgatctcaaccgccacgtctccgtcaatctcgatttagtgcaacatgaattccaactaatttttgtcgattagcacgactgccccaggcgatgttatttctacatctactggggctttttttattgaaatgaatgaacaggagtcctcactttgccaaatgcacagcgtcaaaatagcgcgctttataaactcaatcgtcccgccaaccaactaacaacggaacaacaagcactacaagaacaagtcattcaattttgtttggcaaacgcgcacgccgaacacgccaccttcttgattcaaggtgcggccgggactggtaagagcgtgattctcagcagtgtcttcaaggtactgcagacacttgcgcgccaaacacccacctcgccactctatggcagtcaaaacgttctattggtcaatcatccagaaatgctaaaactctacaaaagtggcacaacaacggcacccgttttattgaaaaaagattttcaacgcccaacgacattcatcaatcaagcggctaaaaaccaccaacttgccgatatcgtcctcgttgatgaggcacacctactgttaaccaaatccgacccctatagccacttcaatcaaacaaatcaactcgatgaaattcgccgacacagtcggatctccattctgatttttgatgaacagcaagtgcttaaagtgaagagcttctggcaacagcaacaactccgccaacgaattgaagctgctccccatcagaccgcgcaactaacccatcaatttcggatgcaagcccatccaagtgttgaaaattgggtgcaaacctttcatcaacaacaagtcgctgccctgccacatgatccacactttgaattcaaaatattcaccgatgccaatgagctctatcaaacgattcgctttaaaaaccaaacgagtgggcttgcacgcatgctagctacttacgattttccagcaacactcaatgatggtcacgatcacttcgttgagacatcgacattcaaattacgctgggatcggtatcagccaaccgctaaaacctattgggcagaacgtgaagatagtatagatgaagtcggatccgtgtacaccattcaaggctttgatctcaactatgccggcgtcatcatcgggccatccgtcacgtatgatccacaaagtgagcggctagttattcatcttgaatattacgaggaccaagccgcatttgccggcgcagcacagctggctgatcctgaagccgcgaaacagcaaattattcttaatagcctctacgttctaatgagccgcgctagaaacggcctttacctctatgctgttgatcccgcacttcaggccaaattgctcagcttatgacaaatcgattttatttcccggggaataagtcggttttctgtctatctctatcgaaaacaagtaaactgtaagtagagattttaaactgataaaggagtgttttaatatgtctaacttaacgagttcatacacgctcacaaacggcgtgcaaattcctaaaattggcttcgggacttggcaaacaccagacggtcaaacagccgtagctgctgttgaagaggcgctcaaggcaggttatcgccacattgataccgcccaagcttacggtaatgaagggagtgttggtgaggccatccaagctagtggcgttgatcgttccgatttattcctaaccaccaaaatctggaatagtaatcacacttatgatttaacaatcagctcttttgaagaatcactcaagaaattacaaaccgactacgttgatttgctcttaatccactggcccaacccaattgcctaccgtgatgattgggaaacagccaacgccgaaacatggcgtgcaatggagatgctctacaaagctggtaaagtccgggccatcggggtcagcaacttccgtgttcgccatttagaagcgctcaaaaagactgcaacggtacaaccaatggtcaaccaactcttcttagcccctggcgaattagaacctgaaactgcccaatactcacgtgaacatggcatgttattagaagcttatagcccacttgggactgggaagattttcagtgtgccagaaatgcaagaattagcggacaaataccaacgctcaattccacaaattgcactacggtggtcattacaacacggcttcttaccattacctaagtctgtgcatgctgaatacatccaacaaaatgcccaagttttcgacttcgaattagccgatgaagacatggctgcaattgatgcacttgacggcgtcgttggacacgcgcaagatcctgatactgcaacattctaaaactgtttaaaagccactaacacagtggcttttttcgatacagatcaacgtcaaaatgtgacaaagcgtattttagtttagatatttaacaatttagtttacctcttccctaaattatggtattttcattattattgaatccgataaaatcggactaaagcccgacgttatttaccgttttaagcttgagaatggtaaaatagaactagttagttaagaaatggggaattattttgtcaagtggtgagttattcactaatctatttgttatgttggtcaccttctttttagccgccttcttcgtggccgctgaatttgcgctcgtccaaacacggccaagtgccttagaagatgccatccattcaggaaatggtaatcctaaaaaattgaatcttgcgcttaaaatgacgcaaaacttaaacgaatatctctcaaccacccaagtgggggtcagtgttgccgggattattttagggtggattggtgaatcaaccgtcgaaaccattctagtcgatctgctcggtctcactcacctgatttcaaatggtggcttacacatcatcggcgcagttgccggcgtgttagtcttaacctatttagaagtggttttcacggaaatcgtgccgaagaatattagtattgatattccaatgcagatgttgatggctgttgctaagcccctccattactgtcatattatcttctatccatttgtttggttactcaacatttccgcaacgggtgttgtgaaattaatcggcttttcacctgctgaagaaggtagtgatgtgctttcccaagcggaaatcattagcctctctaaaaatgccgtcactggtggtgaattagatcgcaacgatttagtttacatgcaacgggcctttgactttaatgaccggattgccaaagatgtgatggttgatcgcacaagtctctacgtcgtcgatatcaccgataccgttaaagacgtcttaaaagactacttacaacaaggctttagccgcttcccagtggttgctgaaaatgataaagacaagattcttggttacgtctacgcatatgatttagtccgtcaggcacaagtcgacgattcaatccgcgtcagcaagttactgcgttcgattatctccgttccagaagcaacccctattcacagtttgttgaaccaaatgatcaataagcaaaccccaattgtggtcgtcgttgacgagtacggtgggacgagtgggattgtcactgataaagatatctatgaagaactattcgggaccgtcaaggacgaaattgacgatgtttcagatgaatacatcatcaaagaagacgataaccgttaccgtgttagtgggaaaacgacgctctatgatttcgaacgtttcttcaagactaaaattgatgccttcgaagcctcagatagcgtgaccctggccggttatgtcttagaaaacttcaccgacttacaacaaagtgcggtcattcatatcaatcaattcacattaaaagtggtcgaattcaatcgcggttacatcgactggtttgaagtctccagcgaaccacaaaataatacagccaacaatacaattattgaaaccaattaaaaaaagagtgtgctatcagccatctcctgaggattaaccacaaggagatggctaatagcacacatttaaacaaaaacagccttgcgcaaatgcgcaaggctgttttttaatttcgttatgctaaataatcacgactccagatgagccccattactttttcgccggtgtgcacgccgaccacaggaccaatgtgactcgtttcaatcggcatccctgggaatgtttccgtcaacgttgcgacccactgcacactttcttctggattattaccgtcaatcacgctaacgcgtacgggatagtcaacagattcgactgctgctttgaaatccgctaatactttttgaaaggcccgtttcttggtccgttccttcgttaaggcaacaatttggccggcatcgttaaaacttaaaatcggtttaatccgcaaaagattcccgacaaaggccgcactattcgaaatccggcccgttcgcaagaggtggcttaaatcatccacaacgaaataaacgcccatcgttgctcgtaaagctaccaatttcggcatgatagttgcggcatgttcaccttgggcaactaaccgcgccgcttccaaggccaagaacccttcaccggcactcgtaatcttggaatcaaaaggatacacttcgatgccttcaaccgactgtgcgtaggcggttaggttattgacaaagctcgtaataccacttgaaagatggatacaaatcacttcatcgtagcccgcttttatcaattgatcaaaaacctgttgcatctgacccattgtaatttgcgaagtcgttggtaatttttcagtagtgcgcattttatcgtaaaatgcttcactcgtgatatcgatattttccaaataagtttgttgtccaaaaataacggtgattgggaccacagtaatattatggtcggcggcaacttgtgaatctaaatacgccgcactatcagtcacaattgctgttttcatgtcaggctcctcaataaaactgtttttgtcattatcccaccaatgtggataaagtacaaatgaacaacaaaaaacgccggaccactttctgcccgacgccacagttattaatgagtcattgattcattctcaaatacgacaatggagatgtgcccatcaattaagccactgttattactcaaggttaacatttgattcttttcgttaacgtctaatacttcatgttcatcaaagtagccagctgcataatctttgtagtaaacagcccctagatttgattcaaattcatctggataatctttaatgtcagcatccgctggtactaatagcaatctaaagttcgtatccaacgagcaataaccaacgtttgaaaatggaccaacaccgtcatctaagtccaataaaattttttgacccggtgtcatcttatccttgattttcgcaactgctgcaggtgttatttttaatgccatatcaatcatccctttcatgctttcagtctaccgccgttttaaatttgacacaatctatctgctcagccggtgtgctacaataggcttaaccgtttatttaaggaggtcattatgcttttttatcggtattcatactttagcaatcagaatgatttcgaattctatctcaaactaagtctgtcagtgatcatcgccagtttaatcatcatcttcttcgttcaatatctccgccaccgttcagattcgaagtaccgtgacttactaatcatcttcggcttagttgggattttactcgccggcattcaatatacacggattcaacagcttaacaccgcccactcgcaacaagcccagatggcgcaattcattagaagtgtggcgactgcgcagaaagctagccttaaaaccgtcgcagtcaacacgacttcgcttcagcaaaacatggtagtgcgcgtcggtcatcaaaactaccaagtcatatttgataacaattttactagttatcaactccaaaaagctcagttgattagccaagacatcacctatcaagattaaggagtttactatgccatcttatttcgatattaccattaaattaattttcggtttcttctgtttagtgttacaaatcaacctctctggcaaggggaatttagcccctagcagtgggattgatcaactccaaaattacgttcttggggggattgttggcggtatgatttataatgccgatatctcgctcttacaattcttactcgttttactcatctggaccttaatcgtcttcacaatgaagtttctaaccactcacaatcgctggattaaacgctgggtaattggtaatccacaaacaattatcaccaacggccacattgatattcaaacggcctctaagaatagtttatccgcacaggatctgtcgtttaaactccgaattgccgggattagcgatattcgcacggtcagtcgcgcaatcttggaacaaaacggacaattaaccattacgcaaaaaggcgacgccacgattaaatatccgctgattatggacggccagattaattcagaagcacttgaattaatcgatcaaactgaagaatggctcctcgccgacattcaacagcaaggctacagtcttcaacaaatctacatggctaactacttgaaccatgaaatcgtgattacgccctattaaaaaagatgacccgcaaaggtcatcttttttaatgtcgtactctttggagaagcgttgcaaccaaccagacaatcgccccgccaattaaaacaatagtgcttgtcttcaaaccataatccagaacagccaacccatagtcggtaattgtttgattaaaatcgcccgctttttgagcaatttgttcaacaatgccactatatttaaacgcagccgcccctagtgccaagaataagccactccaagcaaaacttgcaccaacactccctaatacataccggaattgaccacttagtccccattgaactagtacaagaacaattcccataataattgcaacccaggttaagatattgatcacatttctaacaaacaacatcttagtcgctagtggtgctaagtaaggtgcttcaatttggttcgtgaggtattcttgtagtggtggttgaaccgcaaccactgccgttttaattaaagattccgtcaacgcattttcaggcacaactgcttctaaatgggctgcaagttgtcccatcatttgtgctgtgggtaacggcttttcttgtcctatataaatattatgaacagttttctttaaatcggcccgcacatcagattgggtcagtaatttgacttgtacttcagttggtagcccatttttttgtgccgcatctaataaaacaacgttaattttatcagtcatcgcagctaacgtcttcggttcactgagctgttcttgcgtaaatgattctctcaaaactgtccggctgagaatcatgccactaatgccaaggaaaacgcaaagaaagattaagaacgtcaaaaagcgacttaaacctcgatgtggtcgcacgcttggttgattttgattcaaacgactaattggttccattgattaaacaccctttctattcacgaaccctattaaacttcaagactaggattcttaatcattaaatgctaaagtgaacttatcagtcacaggaggccattcaatgttaaaaaatttaacgattctctatatttcaattgctggtaatacacgttcatttgtaacggatttacaggattatgcggcgcaacaacatgctaataacccagcgttaccaaccattaccctcacagaaatttcggatgcgaccccctttaaagcggagaccgaaccgttttacgcgttcgttccaacttacttagatggtggcaacggcattgataatggcgttaaagaattaatgaccaatagcttaggcgaatacatcgattatgcgcagaacgcacgcctttgttatggagtaatcggtagcgggaaccgcaacttcaacgaacaatattgcttaactgctaaacggtatgcggtacaattcgatgcaccgtttatcgccgattatgagctccgtggcaatgcgaaagatgtcgcgcggatttataccttaatggtcgctaacgcgcaacagcatgcctaaaatttaagattagccggtaatgatgtgattaactcggtgggttgttggacaatttggacagcacccgcctttttgagttccgcgattgtgccaaacccataactaacaccaactgcattcatcgcgttttgcttagcgcccaagatatcattttggcgatcacccaccatcagtaatggtgcggtttgtggtgatagaccaagttctgataatgcgtaagtaatgacatccgcttttttgacccgcgttgtctcatcaacacttgctccaaaaacaccgctaaagtaatcacttaactctaaatgatcaatgaccttcttagcgaatggttctggtttcgaagtcgcaattgccagttgtaaatcctgtgcttgcaatgccgctagggtttctcgcatgccaggataaagttgattttcatacaaccctttaggcgcataataggcttgaaagactttaatagcttcttgagtagcagctgcatttaaaccaaactcacgcataattgtttcattgaggggtggcccaatgaatgtgaccagttcagctttggtttgcgtcggcaatgataactcctcaatcatatattccaaggcgttcacgatgccttcttgcgaatcggctatcgttccatccaaatcaaataaaacggtcccctttgtcatatcaatcatctctcgatctcttataaagtaccttcattttagcatactctttgacccttaaactttccttattgcttttttcataaatctataaacctctggtcacaaaatcttcacaaattcccattatagtattgagtatagaaaagcgaatcttttctatttcatactacttaactttttcattttactcctccaaagtaaaattaaggtagacgcaatctaccacgcacgtattattcccccaaagtaatacgtgtaccccctactcctttttagatcttcggatctgctagaaaccagtctccccaaggctggtttttttgtgtccccatcaaaaaagccgccagaacaatttacgttctggcggcttttctcatttttaaagtaggtactgttgcatcagttcaacggttttgagttgggcatcgtctgatactttatgttgcccattttcttccgtcgttaatgtcactaatgcagtggctgaacttggttgcgcctgaatttcggtcataaaatctgccgtgaattgatatggcaccatcgtatcagcagttccatgatagaaatgcaatggacgtcctgccaagtgatcaacgtgcattgataagtcatacgccgctaaccgtgctagggtatcttcaatcgcatcttgatacttggtttgcaaggccgttggtaattgactaacctgccatttagcaagtgcgacaggcattggtgcgccaatcttatcaacgccaattttgacattcggatatcgggtgagaatcgcatcggttgtaatgccacccatcgaagtccctgtaacaccaatccgttcaggatcaactaagccttcagcgctcagtgttgcaaccagttcaccaaactctgtgaccgactgcatcacaatgtcccaaaattcaaacattaactcagaaaagagctgactaccatgtcgtttaccatgatacttcgcatctggtaagaccacgcgaaaaccagccttggctaaaaagtgggcgaccattaattctgactctttacggtgcgtccaaccatgatatacaaagacagttggtaataccgctttttcttgaccacttggggccacaatcaacgtactgactgccccaatttgccgttcttcagtgctaatcatctcaaatcctcctcaattgccatttatttcccgggtaatattaaccgaagaatgaacctgtaatcttaaaacggcgtttgatataaatccgcacgccgattaagagtgctgcaattacgatttgaacaagtggtggcaagactggattcaagaaacttggaatcaagattgtcacaccgtatgccgcaacaaaggctagtgttaagccgattacaaccaatgccatcttccaaaatggtggccgttgttcttttggcatttgcgtatagcgcattggataagtcatgatgatccccgcaagcgcagccgtaatgacaattgatgtaatcccaatgctggttgctgaccccttcgttgagaaataagccgcaattccgttaaaggctaggtacataattaaaaagattaagccgttatcaagcatttggagttgaagtgatgtttgcttaggacgttttggcgcgtgcaacaattgatcaatcttggttgtcactggaccatatacttgtgttgcaggcttgcccttatgttgttctgctaccatttctggtaacatttctgccaagatttcagtttggcgttctgctggcacttgttcggcatttaatgcgcgtttgaacttaaataaatagtccgcatttttcttactgagttttgcttctaacccttcaatatcaactggttctggggttactgctggttgttcgttcttagccaattgtcttcctcctcaattatcattaaacgttaaatctaaattcgatgatgtcgccatcttcgaccatgtattctttaccttctaaacgtaaacggccagcttctttaacagcttgcattgaaccgtattgatctaaatcagcaaaagaaactgtttctgcccggataaatccgcgttcaaagtcggaatgaatgacaccggcggtttgtggggccttcatgccttgacggaaagtccatgcccgggtttcttttccaccagcggtaaagaatgttgctaagcctagtagatgatatgaagcacgaatcaatttatccaaccctgattcagtcaccccttcggcttccaaaaattcagccttatcggcatcatctaatgaggcgatttcttcttcagttcttgctgagatggcaattacttcggcgccttctttagctgcggacgcttgaatttgtttaacataatccacactatcaggatcagccatggcatcttcagcaatatttgcaacatataaaaccggttttgatgttaataagaagaagcctttaactaacttcgcttcatcttcattaaattcgattgaacgtactgagccgccttcttcaagaacaggcttaatctttttaagcacttcgaattcggctaaggcgtctttgtctttcgtccgcgcaatcttttcaacacgcgcataacgcttcgtaacactttctaaatcagctaagctcaattcaaggttaattgtatcgatgtcgtctaacgggtcaacagttccggtaacagaggtaatattatcgtcgtcaaaggcgcgcacaacatgcacaatcgcatcgacttgacgaatattctccaagaacttgttcccaagcccttcacctttgctagcccctttaacgatcccagcaatatccgtaaattcaaaagtcgttggcacgatctttttagccgggataatttcttgaatccggtctaaacgcttgtcagggacttcaaccatgccgacgttagggtcgattgtggcaaatgggtagttcgccatttcggcgcctgctttcgtgatggcgttaaataacgttgattttccgacgttgggtaatcctacaattcctgcggttaatgacatagttttttacactttcctttactttaaaaattagtttggttgggaccttgttgcatctcttgatagtggggttcatctgcaacaacgacttgtgctgcaggcaccaaattcttcttaagttttttttcgaattcacggcgcggtaataagacggcgtggccgcaccccatgcacttaattcgaatatccatccccaagcgcaccacttcaaagcgattggtgccacaggcatgttgttttttcatctgaacaagatcgcctaatgtatacatctagctcgactcctcactttaatcgatattcacatctagcaatgcaagaatccggtttaaatcatcgactgtgctgtaatcaatctcaatctttccgcgacccttgctgttaatcgcaatattgaccttggtgtcaaatttatcgaccaattgattttcactcgcttgaatatagggtgatttaatcttggtcttcgtcactttcgcagctttaatctggttcatctggttaattaactgctctagttgtcgcaccgttaagccttcatcaatcgtgcgtttcgctaatgcactaatctgactttttttcttcaatgataataacgtccgcgcctgtcccattgaaaggtcaccattttgtaataacgtcttcacgtcattgggtaaacccaataagcgcaagtaattggcaatgtatgggcggctcttgcccaaccgttctgatacttcagcttgagtcaggtttaactttttcaagagtgtatcgtaagcttgggcttcttctaacggcgttaaatcttcacgttgcaggttttccaagaccgcaatttccatcattgcggattcatcaaactgccgcgtgatggctggtatcgctgttttaccagctaacttagacgcacggaatcggcgttcacccgcaattaattcgtaaccattaatacttttgcgaacaatgattggttggaaaacgcccgacttcttaattgacgctgctaattcagccaaagccgcttcatcaaatgtcttccgcggttgatagggatttggacgaatatcatcaagtgcaatctcttcaactaattcatccgcccggtttttattagggccttcgaacgctgaaaatacagcatccaaaccgcggcccaatccttttccatttctagttgccatgagctgctaacacttcctttgccaaattttggtaaacttcagcgccccgtgattttggatcataatcaatgattgatacgccatgactaggtgcttctgctaagcgcgtattccgtggcacaatcgtgtcgtaaacccgatcaccaaaatacttacgcacttcttcaatcacttgagcccctaaattcgtccgcgcatcatacatcgtcaacaacacgccttcaatcgctaagtttgggttaaaatgtttttgcaccaaacgaacggtgtttaacaattggctcaatccttctaaggcataatattcactttgaactggaatcatgattgaattacttgccgtaaaggcattgattgaaagttgccctaatgaaggtggacagtcaatcaaaacgtaatcataatcggctaagactggttctaaccctaacttcaagcgcatttcacgcgccatctgtgatgttagctcgatctctgcccctgcaagttgaatcgtagctggaacaatgtctaagttcttatgtgatgttttaataattgtttcttttagtgggaattcatcgaccaacacatcatagatatctttttcgacttgggatttttgaaccccaatcccgcttgtcgcattcccttgtgcatctgaatcaatgattaacacgtgattgccagcatccgccaaacaagcgcctagattaatcgtggtcgttgttttaccaacgccacctttttgatttgcaattgaaataacgtgtgccataatgagcctcccttattgctttggaatttcgatcgtaatccgataaacatcatcttgttcttcttcggtggctttgacggcaatcccgctttgttcaaccatttgaaccgactttttgatggtgttgacggcaatgcgtgtatcatgggcaattgctttttttgctttatcgttcgcttttttagccttcgtggtagcttcttttaaactgtcatcggttgcatcaactgtctcttcagttgattctggttcaggattcaacgtcttgttaaccagcgcttccgtatccttaaccgttaattgttcagccaagatttggtgtaaaatcatttgttgcttgaattcatccaaccgtaaaaggctccgaccgtgtcgttcagaaatttcatgattcatgatggcttcttgaacgggttgtgagagtttcaatagccgcaacttattagcaacaaaagattggctcttacccatcttttctgccaagctggcttgtgtgaagtcgttcagcttcattaagtccttataagcttgtgcttcttcaacggcggttaattcttcgcgttgtaagttttcaatcaaggccattgaagctgtttcgtgatcatccatagtttgaacaatcgctggtaattcagcccatttgagggtttgaatcgctctaaaacggcgttcacccgcaataatttcatatttttgatcttcatattcacgtaagataatcggttgcaataagccgtgttgttcgattgtgcttgctaattcggcgatattgtccgcattaaatacttttcgtggttggaaccggttaggcacaattgctgaaaccggcactttgatcacttgattaatacttttatcgtcttttttcttattaaaaaatgagagtgccattatttttcctccttagccattaacggttttttaactggcacaccagcccgccgtggatacttggcaggtgtcggtacaaccttatcaattacgattagatgtcgttgatcatctgtttctggtagcgtcaaagcaatgtcttgtgcaaattggccaccaagtgtttcgattgcatagttggcttctgccaattccgtttcaccttgactcgcttttaatgcgataaactgcccaccaactttaacagttggtaaacagaattctaccagtacatttaatgaagcaacggcccgggcagtcacaatatcaaactgttcacgatatggactcttcgggttgctgaacagttctgctcgatcatggaccaacgtcacatcagacaagcctaattcacggaccaattcttctaagaagtgaatccgcttgtttaatgaatcaacaatcgtaatcttcaattgcgggaataaaattttgattggtaacgatggaaaacccgcgcccgcaccaatatcgcagatcgtaaggggttcagtgcgtagtttttcaagatacaaagttggtgtgacagaatcgaagaagtgcttgagataaactgcttcttgttctgtaatggctgtcaaattaacttgttggttcacttgtacaagccgtttgaaatacaattcaaactgatccatttgtgcttgtgaaacttgaatattgtatgtttttaacgttgctgcaaaacccgctggtgtcattatttctccttaactatgctttaaagtaggcgtttaatttgtggaacattattgtttcacatataccttttagtttaacgtacttaccctaaaaaaacaagattcttcccagttttcagattatcgtttcatgtgaaacataataatcggtaatttaagaacaattatcgcctttttcaagcgaatcattcagtaagaaagcacttttgtcatcgaacagttggtgtgcatcatcacaaaggcgaactatcgcgattatttaagaatgttatattcgttttttacttaatttctaattgaagtcactattggcgtgtgctaaactaaatgttaactaaattttaacaattatcttggagggacactcgtggcagatatacactcgaattcagcacagccaattaatccaaatgaaaagcttccccacattaaagcagcgattctcggcttacaacatcttctagcaatgtattctggcgatgttttaattccattacttgtcggggctgcattacattttaatgccgctcaaatgacttacctcgtttcagtcgatattttcatgtgcggggttgcgaccctattacaattaaaacgaaccccactgaccgggattgcattaccggttgtcctaggttgtgctgttgagtacgttggcccgttagccgccatcggcactaacagccaactcggaattgacgttatgtacggtagtattattggcgccggaattttcatcttgttagtttctggcttgtttgcacgtttgcgttggctcttcccaccagttgtcacagggtctctcattacattaatcggattcacattgattcccgttgctttccaaaacttaggcggtggcgatgttgctgctaagtcgtttgggagtacaccaaacttaattaccggtttttcaacgattgccctaatcctgatttttagtatctgggggcgtggcttcatccaacaaatcgccattttaattgggattattgctgggaccttaatcgcagctgcgattgggattgtgtccttagatccagtaggtcaagcaagttggttcaaattacctgaattattctacttcggaacacctcgttttgaatggtcatcaattgtttcaatgtcattggctgcgttaacgaccatgattgaatcaatcggtgtcttcttcgcccttggtgaaatcgttgggcgcgacattactagcaatgatcttaagcggggcttccgcgctgaagggattgccgctatcttagggggattgttcaacaccttcccttactcaacgttctcacaaaatgttgggattgttcaattatccggtatcaaaacgaaaaaaccagtttactactcagcattcttcttaatcatcttaggattattacctaagattggggccgttgcaaccattattccaagcgctgttttagggggcgcgatggtcgttatgttcggcactgttgggattcaaggcattaagatgttacacaaagtcgatcttgatgataaccgcaacttactagtcgctgccgtttcaatcggcttaggcttaggggtagcaattcatccaaccttgctccaatcactaccaacgagtgttcgcacaattctaggcaacggcttagtagtcggcagtctcagcgctgtcatcttaaacttactattcaactatcgttcattaattgcagcaaaacatgctgaacaaaaataaatcaaaaaaagtgcctacaaatttaaccgtttgtgggcactttttttgtctattcaatttcagttgtccgaatacttctagcaagtctatttgtcatttcaaacagctgcattaattctggcatgctaattttcttatctgattcagtaatacttttaatgtaagttccacacgcctgctcaaatcgacgataaattgattctccagcgggagaaactgctatatcaacaattcgacgatcatcctgtttgccatattgtttgctgatatacccctgatcctctaatttacgtaatttatttgaagatgctgcggtagatgtttttaatacttgtgcaatcttactattattaatacctttatagcgttttaatgtttgtaaaatacgaatttgttcgatggtaactccgtcttcatttaaaatttgactaatgtttgctgaaatttgagccatctcatgatagaaattaatcaactctaatttatcagtcgattgcgctatagaattcatcattcctcctccgtttcattcataatcctttgataaaactggtgccaccggctaaaatactgttgcaatgagaaacagtcgttaatcgtttgccgggcatttcgtgaatatgtttcacgtcgcatctgactacctagaaaatcactgagttgttgaactaagccagcgtcatctcctggtgtcaccaaatccccgttcacatgattctcaattacttgtggaatgtccccgacattcgtagctaaattgggaattccataagccatcgtttctaaaattgccattggtaagccttcttgatatgtgggcaataggtgtaacaggctttcttgaataacggtattgcgatccgccaaagctaaccagccaccaaggcgcacattggttaactttaggcggtctatttcttgctggaccttcccctgttcaccatcaccatacaacgtaaattgaatatccggaaaacgggattgaatcacccctgctaattttagaatatcgtaggtgcccttacgttcgcctaagcgccccagtgtgataatttgtttagactgactatggtatttgtattgcttaggtagttcaaccgcattagcaataatcgtaatcggtgtttgcgtaagtgtttggtaaaaagttgcccattcagtgcttaacacaacaatgccatccatagccacggaaaacaatgttaatattaattgaaattcactatagattcgcattatattaactatttttggatataaataaatttttaaatatctttagaatattctcataaaactaaagtaacgatgttatcattctatttctccctcccattattgtcatctaattaacgaatatcagttaatatgcccatcaaaaaaaccatcataattaaagtttttactttaattatgatggtttttttaagtatttcatttacgataatattcactatttattaaaaatagtcattactattggtccgcatacgaaattgatgagaacttattaaacgttttgacaaataataatttgactgtccctcgtgcacccgcacggtttttttcgataatcacttcaacttctccaacgtccgcatcatctgactgctgtggcgctggtgctggcggattgccaccaccgaaatcatcgccatcttccctaggttcatcgcgatagtaatcatcacgatataagaaagcaacgatatcagcatcttgttcgattgatcctgattcacgaatatctgaaaggactgggcgtttatcttgtcgttgttcaaccccacgagagagttgagagagcgcaatgaccggtacccgtaattctttagccaatttctttaattgacgtgaaatcgccgagacttcttgttgccggttttcttggccggaaccttcaattagttgcaagtaatcaatgacgattaagccaacgccccctttttccttcgctaagcgccgacatttcgcccgaatttccgccattttcacgccgggcgtatcatcaatatagatattcgcttttgaaaggctccccatggctacgattagattctgccattcaagttcgtcgagttgcccggttcttagatggttggcgtcaatacttccttctgcacacaacatccggttaacgagttgttcagcacccatttccaaactaaaaattgcaatattctcattggttttcgtcccgatattctgagcaatgtttaagacaaacgcggttttccccaccccgggccgggccgctaaaataatgagttcatcttcatgcaaacccgcagtaatcttatctaaatcgcggtatcccgttgatagacccgtaatgtcttcttcattttgatataacttatcaatttgttcaattgaactcgttaagacatctgaaattgatttgaacccggccttattttgccgttcggaaacatccatgatttccttttcagcggtatctaaaatatccgtgacgtcttcatcttgcgcgtaaccctttgccacaatattttgagcggtttggattaaacggcgcagcattgctttttcagagacaatcttggcataataaactacgttggctgccgttggtacagcctcagccaactcagctaaataaccaataccaccgatatcttccaattggttctgcgcatcgagggcactctttaaagtcaccgcatcgattccttcaccccgttcgtttaattcaaccatcgtctcgaagatcaaacggtgggctttacgataaaaatcgtcggcagtaacgtattccattgcttcaacgagcgcatcgccactaataaagacggcccctaaaacggcctgttccgcctcattattctgcggcggtacttgttcaattagttcattattcaccatttttactcctttggttaatcgacttcaattactcactagtttactcaaaataccagtgactggcaacagtcaccgattggtcagcaataaaaaaagccgtgatagtggtgctaatcacggtcttttcaatcattcattttattattcggttacgatatgcacacgaatcgtagctgttacatcagggtgaatccgtacatcaacattccggtaacccaacgctttgattggttctggtaaatcaattttccgtttatcaacattgatctgatattgttgagccaatgcttgggcaatttgcttgcttggaattgaaccaaataagcggctgtcttcgcccgctttagatttgatttcaacgattgttttatcgtcttcaattttggcttttaaaacctttgcttccgctaattcagcagctgcatttttagcttcagcatgttgttggccttttaaagcactgatagcagctgatgttgcgggttttgctttcccatttttaattaaaaagttttgtgcgtaaccatctggcacatctttcacttggccttttttacctttaccgcgtacatcttctaagaaaataactttcattgttctgaccaccttatctaattaatcgtttgttgcttccttgtccgtttccggatcaaatagctctgccaaaaccgttaataacttcgccttggcttcggaaacagtcgtatctgccatctgcgttgccgcattggaaagatgaccaccgccacctaatttctccataatcacttgcacattcacatcacctagactccgcgctgaaatggcaatcatgccatctgggcgtttcacaatgacaaacgaggcttcaatgtctgacaatgacagcaaggtatccgctgcttgtgctgcgatgaccggatcgtaggtacggttgtcctcacccatacataatgccatatttggctcaaccatttcaatggtttcaattaaatgattcttttgaatataattatcgacattttcttttaacaagtgttgaaccatcgaagcatcagccccaactgaacgtaaataactagctgcgtcaaacgttcgcgtcccagttcgcattgaaaatgactgcgtatcaaccgtaatcccagccaacatcgttgtggcttcgaacttgttaatattagcgacattttgtggttgatactcaaacatttccgtcactaactcacacgttgaagaggcgtagggctcgatataaaccaacattgggttttctgggaactcttccccacgacgatggtgatcgatgacaatcgtccgctgagcaagcttctcgtacaacttaggcgccattgttatggatggtttagaatgatcgaccatcactaataaactattggccgttgctttttcgagcgcttcttcaggcgacaacacttccactgcaatttcagggtaggctttaacttcctctaaaagacgttgaatatctgtatgaatattgttttggtcaacgaccacgtagcacttcttaccgttcatctcggcaatccggcgaatcccaaatgaggcgcccaatgcatccatatctggccgaatatggcccataacaaagacttcgtcaacttgtttgaagatttcttgtaaggcttgtgaaatcatccgtgcacgaacccgcgtccgtttttccatcggattagtcttaccaccataaaaacgtgcttgtccttcactcgctttgacaacgacttggtcaccaccacgaccgagggcaagatccaaattgctctgtgaagttgttgctagaacggctaaatcggattccccataagcaaacccaacactcaacgttagtgggaagttttgtttggatgtttcttctcgaatttcatctaaaatcttaaacttctcttgttcagcggcgtgtaatgatttggcgtacgccaaaacaaagaaatgatcatcatcaactcgcttcaagaacatctgaaactgattcgcccagcgtgataactcgttggtgacatagttattcagattagaaacagattgatcatccattgtctgagtgatttcatcataattatctaagaacacttgcccgatggctacttgctcatcttcataacgatcttcaatggccgcatagcgtgtaatatcgagaagataaaccaccccaatgctttcttggataatgatttggaattgattatcgccccaacgaacaatttttgtttcattagcatcttcattttgtgcgactaattctgccaactctggatcgacagacttaatctttttgcctaaaacttctttattaccgaaatattgctgtaaataaggattcgtccattgaatctcacctgattcgttgtacaataaaatcccaattggcatcttaattaaagcctcttgctcgccgcgcttaatgcggtacgacaagtccgagacatacttggctgtattctcagtgaccgtttcgatcgcgtatagcacagtaatgaccgtcccgattagcagcacgaataaaattagagcaattagccaatctaacatcgcagcaaataccaaactaaccgctgtaaggcccaacaaaatcagggcaacggtccgcaggcgagtatcatctaaaaactgtggtaattttaattgtttaaacttatttttcatgtaaactccttaattctagatcccattctgattcttgttcatctatcattgagtctatgtggttctttactaaaacttaaaaaatactacttttattttagcacaattgccctacaattaccgctttgaacccgtaatttaatcccatgttcccctattaaagcgcacaaaaaaagacctgctaaacagtgtttagcaggtcttttggttgactgattagtcttctgtaacgaatggtaataagcccataatccgtgcgcgtttgattgcaattgtcaaacgacgttggtttttagcacttgtaccagatacccgacgaggtaaaatcttaccgcgttctgagataaaacgtttcaataaatcagtgtctttgtagtcgatatattcgatgtggttagcagcgatgaaatcaaccttacgacgacgacggttgccgcctcttctttgttgagccattgaaagttcctccttccaaaacagtttattttagaaaggtaaatcatcatctgaaatatcaattgcttgaccattatttgcaaatggatcggcttgagtgttatttgcagctgatggattacccgattgttgagggctggtaaatccagattgttggctaccattgctttgattgttgttaaagttttggcttgcgccatccccttgccgttgctccgttgttgtccgtgattctaacaatgagaagttatcaacgaccacttcggttacgtatacacgttgaccttgttggttttcataatttctcgtttgtagacggccatcaactccgactagtgagcctttcttagtgaaattagcgaaattttccgctgatttacgccagatgacacagttgataaagtctgcttcacgatcaccattggcattcgtgaattgacggttcactgcgattgagaaagtcccaacagcagcaccactagaagtgtaacgtaagtcaacatcgcgtgttagccgaccaacgagtacaactcgattaatcattctgtcagctcccctctattcaataattacaattcaaaattagtcttcgcgtttaacgatcatatggcgtaatactgagccatcaatcttagctagacgatcaaattcgtttaaagcttcatcattatcagctaaaacatttacgatatggtaaatgccttcgtgttgattgttgatttcataagctaaacgacgttttgaccagtcttttgaatcaatcacttcagcgccgttgtcttttaagatgccgtcgtaacggttgacaagagctgttttactttcttcatcaagtgttgttgagatgatgtaagtaacttcgtattttgattgagccatgactgttcacctccttatggactttaggttcttacctgtgtaagaacaaggagtaactgactaataaaaattagcctcacgatttagaccctgtgtctaaatcacagatactcacaagataaaattctatcataacggccgttaaaatacaatctaaaataaaaatcgttgctgctaacacgcttggtaacagttgttacaagtgtatttacgcagaaacgatttttatttttttaatttaattaattttctgaatcttgatcatctgatgccgattgatcggcttcagcccgcgcgagtaattcatcgacttgtgctaagccagtatcagtagtgtcatcagttggtgctattggtgccgtcgttgcttctggtgtttcaggttcatctggttcagcttcgactttcgccattgttgcgaccttcgcttcgtcatccacccggattaaacgcacaccaagtgtggcccggccagtttgtgaaacgttagcgaccttgaaacgaatcaagacgccagtatcagtgattaagagaatatcctcttctccagtgacggcagcaatcccagctaatgggccgttcttttcagtaatgttggcagtcttaatccctttaccaccacgacccttgattgggtaatctgcaaccggtgtccgtttgccgtaccctttttcagagataacaaggatttcttgacccggaatcagtaagtcagagccaaccacatagtcgccttcacgtaaccgaatcccacgcacaccagcagcggttctccccatcgaacggacagctgtctcactaaatgacacagcataaccattatgggtcccgataaagatattttgttgcccatcagtcatcaagacgttacttaattcatcctcttcccgcaaggtcaatgctttcaacccattgctacggatattggcgaattcagaaacggatgtccgtttgaccgtccctaagcgggtaataaagaagagtgattgttcgtcttgcacttctttaccaacattaaccacggtctgaacgcgttcatcagaattaatgcctaataagttaatgattggaattcccttagcagtccgcccatattctggaatttcataccctttggcacggtaaactttcccagtattggtgaagaataagagcacttcatgagtcgaagtcgaaagcaagtgttcgatgaagtcgtcatcatggacgcccatcccttgaatcccacgaccaccacgattttgaactttgaattcgctggctggtaatcgtttaatgtagccgttatgcgttaatgcaatcacaacgtcttcttcttcgattaagtcttcgtcttcaagactaagcacttcacccaccaataattctgtccggcgtttgtcaccgaatttactttggagttcaagcaattcatcgtagataatcttcttaatgcgttctggtttggctaaaatatctttcaaatcagcaattaaagtcatcaaattattgtattcattttcgactttatcacgttccaaaccggttaatcgaactaaacgcatatccaagatggcttgcgcttgtttatccgataaatcataacgatccatcaacaagaccttagcggcatcacctgtattcgaaccacgaatgatctgaataatcgcatcgatatggtctaaagcaatgcgtaacccagctaaaatgtgcgcccgcgcttcggccttcttcaaatcaaattcagtccgccgacgaatgacttcttcttggtgcactaagtagtgttccaagattgatttcaaactcaagactttaggggcaccattcacgatggccaccatattaaatgagaatgaggtttgtaatggtgtcaatttgtacaggttattcaagacaactgaagcactcatatcccgacgcacatcgattacgatgcgcatcccatcacgatcagattcatcgtttaaatcggtaatcccttcaagccgtttgtcacgggctaattcagcaatccgttcgaccaacttggccttattaaccatgtatggaatttcagtgacaataatccgttctttgccgttcttttggacctcaacgtccactttagcgcgaagggtgattgtccctttaccagattcatacgcatggcgaataccagatttacccatcactaacccaccagttggaaaatcagggccaggtaaggcatccatcaaatcagcggttgtcgcatctggattatccatcaagatgtgtaatgcgctaatcacttcggctaaattatgcggtggaatattggttgtcatcccaacggcaatcccagtcgccccgttgacgagtaggttcgggaaacgggctggtaaaacagcgggttcgcgttctgactcatcataattcggtacataatcaattgtattcttattgatatcacgtaacatttcgacagccatcttgctcatccgagcttcggtgtaccgcattgcggcagcaccatcaccatcgacagagccgaaattcccatgaccatccactaacatgtaacgataactaaaatcttgtgccatccgcaccattgcttcataaatcgctgaatcaccatgtggatggtacttccccataacatccccaacaattctggcagatttcttgtaaggcttttcgggagtgatccctaattcattcattccgtataaaattcggcgttgaacaggttttaacccatcacgaacgtctggtaaggcacgcgcaacaatgacactcattgcatattccaggaatgatttacgcattgtcttagataaattgacgttttcaatccgaccgtcttggccaatttcgtttgccattaatctataaacccctctcagtcagtctttcaatgtgtccgtttaagcggcgaacacgctatgcatcgatgctctttggatccatgtaaacggcattttcttcaatgaaaatccgacgaggttcaacccgatcgcccattaacatttcaaaaatttgatccgcttcttcggcatcttcaacgttaacccgcaacatgcgccggttttcaggatccatggttgtttcccataattggctagcatccatttcccctaaccctttgtaacgttgcacttcaggtttaggacttggttggagcgtccctaacacttcttgtaattcttcatcagaatcaatatagcgcatcatcttcccttgtttaacacggtacaaaggtggttgtgcgatatacacgtaacccgcttcgacgattggtcgcatgtaacggtagaacaacgttaaaagcaacgtccgaatatgcgcaccatcgacatcggcatcggtcatgatgatcaacttatgataacgggctttagccacatcgaattcttggccaaaaccagtgcccattgctgtaaataaggtccggatttcatcattcgccaaaattttttccatgctagctttttcaacattcaggattttcccccgaattggcaagatggcttgcgttaaacgtgaacggcctgattttgctgaacccccagcggaatccccttcgacgatgaataattctgaaatagcaggatctttactactattatcggccaacttacctggcaagtttgagatttcaagaccgttcttcttccgtgtcacttcacgagcgcgtttagcagctaaccgggctttggcagccaatgagcctttgtcgacaatttggcgggcaatcgatgggttttccatcaagaacttcgtgaaatgatcagagaacatccgatcagtcaccgtccgtgcgtcggcattgcctaatttcgtcttcgtttgaccttcaaattgaggatccggatgtttaaccgagacaaccgctgttaagccttcacgcacatcttccccagagaggttcgtgtcgttggcttttaagatgttttgcttggttgcgtagtcattaataacccgcgtgagcgccgtcttaaagccagattcatgagtcccaccttcgtaggtatgaatgttattggcaaaggtcatcaagttcgtccgataatcattcgtatattgcaaagcaacttccacggtaatcccgttttgttcaccttcaacatagattggttcgtctaaaagggtctcttttttgtcgtctaaatattcaacgtaactcttaatcccaccttcatagtggaattcaagtttttcatgtgtttcagcccgtttgtcggtgaacgttaacttcaagcctttgtttaagaaggccaattcccgaatccgcgttgttaaaattttatcatcatacaccgttgtttcagtaaagatatcagcatcagggacaaaatgaactttcgtaccatgttcatgggctggtgcgtcaccaatcatcttcattggcgtttgcactttcccccgcttgaaatcgatgtagtagcgtttaccgccttgagtaacaaccgcatctaattccgttgacaaggcattaacgaccgaagccccaacaccatgcaacccaccagatactttgtatccgccgccgccgaattttccaccggcatgcaagattgtaaagacggtttcgagcgcagacttaccagtcttagcttgaatcccaactggaatcccacgcccatcatctgtaactgtaatactattatcgggttcaacaaccacgttgatttctgttgcaaaaccagcgagtgcttcatcaatcccattatcaataatttcccaaaccaaatgatgcaacccttgggaactcgttgtcccaatgtacatccctggtcgtttacgaacggcttctaggccttctaacacctgaatttgactggcatcataagatttagcgcgttcttcttttgcttccatttgtgcttctgtctcttgattcatttgatcatctgccaagaaaaaaacctccgtttgatcgttttttgactaatttgctgctgcatcggccactgtcacggtgccgtttatcacggtaaacacccgtggcgcactaataatttcttttttgacattttcaagactagttgtcgttaagaacgtctgcaccttattctggaacgttttcaataagtgtgtttggcgtaaatcgtcaagctcggacaacacatcgtccagtaataggacgggatattcaccggtttgttccttcattaggtcaatttccgccaatttaacacttaacgcggttgtgcgctgttggccttgagagccaaacgattgcacgtccttaccgttaaccaaaaataacacgtcgtcgcggtgcgggccaaccaatgtcgtgccctgttcgacttcccgtgtttggtgcgactcgtatagggtttgaaactgttggtataaaccttcggcatcaagtaccaactgctcatctggaatctgactttggtatttaaacgtcaaaacttcccgctctttggtaatctcttgatgcaacttctgcgcccacttctccatctgttgcagaaattcacggcgagcaaccgtgacttccgcgccataagcggctaactggtcggacaatacgcctaaatacactaaatctttagcttgacgtcgttgtagttgcttcaaatactgattccgctgtttcaaaatcgacttgtattgcgaaatgttatacaggtacttcgcactcatttgaccgaattccatatcgataaagcgtcgtcggacagctggcgagcctttcacgatattcaaatcctccggtgcaaacaagacgacattcaattgaccgatatattgggataacttagcctgttctaaatgattgaccttcgcttttttacctttttgactgaccaccaattctaatggtgtgtggccagtttgccgttgtaccaagccggtaatctttgcgaattcgccatcccattgtatcagttcacgatcattattcgtccgatgcgaacgagccaaagccaacacatagatggcttctagcaagttcgttttgccctgcgcattttcaccaatcaagacattgatatctggcgagaaatggacgtccacttgctcgtaattccgataatgatcaagttggagttcacttaaatacatagtcgcctacaatctttcttgttgtttaatgacaaactggccgttatcgggcacctcaacgacgtcttccagatataacttccggccgcgacgatcatcaggttctccgttcactaaaaccgttgtttcttttaaaaaccattttgcttgcccacctgtttcaatcacaccggcctctttaaggagttgcccgagtgtcacaaactcagcttcaagtttaatttcttgtgccatactcaacccaccattcttaacgatattaattactgcgctaataccgatctgttataccttacaattatagactttttttgccttaaaaacaaataaacacagctaaaatgctttctgagcgtttttaagtgctttaaccttatcctacttgttttatccgaaatcgctgtaaacgaatttattttaattttagcgcaaaaaaaaacgccccatttttaaatgcggcgttttttgattattaaaatgtccgaactggtgtgattaattgaatgtagtgttcttgatcttcacttgggaccaatgtaaatggccgtaaagctgccgtaaagttaatcacgatggttgtttgaccaaatgaacgtaaagcatccttcatataatctgggttaaatgaaatttcgagatcttcgcccgttaggttttcaaattgaagggcttcttcaacattcccaacgtccggtgagttcccgtagatgattgccgtgttgtccgttgtattcaatgtcaaccggacaacattgttccgactttcatgagacaacaatgatgcccgttcaatcgcagctaataagaccggtgcattgaattcgatttgtgtacttgaagaagttggaattaaacgtgctgtgtcagggtaatttccttctaacaaccgagaataaaaggctaagttaccggctttaaagagcacttggttttcagcaatccgaatttcaacggtttcaacttcgtctgctaacgttcttgaaagttcaattaaactcttcccaggaataatgacatcgtagtccccatcacttggtactgaaacggttaattttcgttgtgcaagtcgatgactgtccgttgcgacggctaacatttcgccatcttttaaaaccaaatgaacccccgttaagattgggcgactttcttggttagaaacagcgatgacggtttgatgaattaattgtttaagcacatcagtactgatactgaacggattttgtcccgcaatttcaggtagatgtggataactattagcatctaagccattaattgtaaattctgatttacctgaacgaatggttgtttggaagttgtcaccaacagcaatcgtcatttgatcttcaggtaattttttaacgatttcactaaagaagcgggctggtaaaacaatggcacctgcttcttcaacgactaattgattcttttcatcattactagcaagggttgcttcaattgaaatatcagcatcactaccggttaaggttaagccttcttgcgaaagcactaatttaagccccgtcaaaataggaatcgttgttttagctgaaatggcacgttgaacatcattaagggttttgatgaacacgttgcggttaattgagaatttcatggatgttaaacctccgaaggaaaatagatatatatattataaaagaattttaagtaatagtagtagggcctgtggaacctgtggataacatagaaaagcaaaagagtgtctagttttccacttgtggataagttgagaacaactcttaggataactttagcgtttatccacagcctatatttagccttttaaggtattcttcaaatctaagatggcatcttttagattttgatcactcgttaaagcttggctaattcgttcatgagcgtgcataactgttgtatgatctttaccgccaaattcttgtccaattttgggaagagaactgtcggtcatttcgcgggccaagtacatagcgatttgccgtgggagcacaatttctttaacgcgcttgcgcccttttaaatcagtgattgaaaggctgtagtacttagcgactacggattgaatcttagcaattgaaagttgactcgacttcccattgagtttcaagcctttaagggcatcggcggcaagactagttgtaatttcagcattttgcatggttgcataagcttgaacccgaaccagtgaaccttcaagttcacggacgttggaatcaatttgaccagcgatgtagctcaaagtatcttctgggatttcgaggcgttctgtgtcggctttgttccgtaaaatagcaattcgagtttccagatcaggcggcgtaatgtcgacggacaagccccatttaaaccgtgaaactaagcgttcttggagcttaggaatttcattaggtaaacgatcagatgttaagacaatttgctttttatcattgtagagatcattgaaggtatggaaaaactcttcctgagtcccttctttatccgcaaaaaattgaatatcatcgaccaataataaatcaacgtttcggtattcttggcggaatttttcttgattcttcgtttgaatcgaattgatgaagtcgttggcaaaagcttcactcgtcacatacttgacgttcgtgtcaggtttagagagtaacagctggtgaccgatagcttgcatcaaatgggttttacctaaaccaactccaccgtataaaaaaagtggattatataaaacaccgggttcttctgaaacaacgagtgctgcagcgtgggccatctgattgcctttcccagtcacaaacgtgtcgaacgtgtatttactatttaaatgcgtttcacgtaaaaaggttggggtttcagctttggtgaggctgcgttcttcagctggtttttcagcttgaagctgctcggcttcggtaggtaacagaaaaataggggtcaattcaatctctgcgaattcgtaggccccttcaacgaccttagtggccaagttactttcccaatactctttgtgtaaaggagaaggcacttcgatcagtatttcattggctctaaaagcaagcggtttggcggttttaatccaagcattaaaaccgacgggtgttaaatcattttggaattcttcccgcaaatagttccaaagttcctgaagatcaggcatgtagcgtgtcctcctcacgtaaaataaccactttattgaaaaaaagttcaataaagaaagactatctacattctagcattctaaaaaaaagttttccacaacaagaacaaaatccacaggaatgaattaaaaagttatccacttgaacacacgaccggggataacttttagtggggactgtggaaaacagaaaacaacaaacgattatcgcacttatccacaaaaaagtgtgtgtatctgatgcttgctattaaaaggttttatcaatttgtgcacagcttgaaaatagcttgtggataacatagtaacaccctgtgattttctggataaatcagcaagtaatctgtgcgtgacaaaaatcggacgattcggtataatcagttatccacaagaaagccaatgaattattttttgtggataagaatatttattctgtttttttatggaaagtgttttaacttctatagaaatatgctattatattttagtgaatgtcgtaggtggtatttatcacccgttgtttctcagatatgaaaacaatagacacagtcaattaggaggtgccagtataatgactacaaagagaactttccaaccaaagaaacgccataaagaacgtgttcatggtttcatgaaacgtatgaatactaagaacggtcgcaaggtacttgcaagacgccgtgctaaaggcagaaaagtattatctgcataggccactgatgcttcagtggtttttttattatcctcaattaattaaatgaaatgccggagtgaattatgagaaagtcgtaccgcgtcaaaaaagaacaggatttccaaacggtttttgaagcaggtcattcagttgccaaccgcaattttgtggtttatcaattagaaaaacctggtcaaaagcattttcgggtgggcctgtccgtaggtaaaaaagtgggtaacgcagtgatgcgtaatcaggttaaacgttacattcgccagagcttgttggagttgaagccagagttaccacagactgtcgactttttagtgatcgcaagacgtggcgctaaccaactaacaatggcggaaaccaaacagaatttaatgcacgtcttaaaactagcaaagctattaaaggaagaagcagattctgcttctgaataagtgagggattacagtgagttcaaaaaatcgcaagcggctattattagtggccagtctattcttgttcatgctaatcgcagcggggtgtagtacatcaccagttgatagtagcagtactggcttctgggatcattatgttatttataacttttcccgctttattttatggttagcagacatctttggtggcagttatggttgggcaattgtggccttcaccatcatcattcgggtgattatcttgccattaacttggtggcaaagtaagagcatgctcaaacaacaagaagttgcaccagaaattcaagcacttcaaaagaaatatgcttctaaagatgctgagacacaacagaagttacgcgaagaaacgcaaaagctatatgctgaagcgggcgtcaatccagttgtgggctgtttaccactagtggttcaaatgccagtgttgattgccttgtaccaagcaatctatcgaacagctgctttaaagagtgggacgttcttatggatgcaacttgggaaagctgatccttactttattatggctatcttggctgcgatctttacatttgcaacatcgtatctaacaatgatgtcgcaacccacgaagaatgctgcgtcatccgcaatgttgtgggtgatgccaatcatgatttttgtgatggccatgaacatcgcgtctgctgtttcaatttactgggtggtaacgaacgccttttcagtgggtcaaacaatggtgattcaaaatccatttaagattcgccgcgaacgcgaagccaaggaaaaagaaaagcgtgatcgtgaaaaagcacttgctaaagcacgtaagaaagcaactaagaaacgttaatttccaaaattaaaagaccaatcataatgaattttcattatgattggtcttttttagaataggtaataggcagcaagtacaagaggaattgcgatagcgcagacgacacaaacggcaccaataagtaacccgcttttatggcggttaatcgttgtttttctcagcaagaatcgggatccaaaaaataacagaatggtaaaaggatgaggggaacattctgagccaccccttcgacaggtggaaaggttagcattaaataatctaatagcaaataaaggagtgttgttaatataaaaagaaatagtttcaatggctaatcctccatagcgctagattaaaaaatagaaattcagatagataaattgttaaaattggttttaaaccgttttcttaattttatagtagcatcatgattggtaataatcgataactaatttcaagactaataatcattcaaaaatctttaagaataaaaaaatcgtaaccgatttggttacgattttttgctgtttaatagtctaattgtttcaaatgaaggaggaagtgctgatcatcaatcggttttagatgataaagcactagaattttacgcgttaactttggttcaatcggtgcagcatcgtcaaacatatggaagtgatcgaaaaaggctgtattgacttgctcgattaacgttaaaatgccggcactccctaaatcgaacccaagatggtcggtgtctgataattgactcgccttaatatgggttaagtattggatcagttcgggtcccattgccataattttatcgggcacttgggtcgtttttaacagtgtttttaaatctgcgattgtattagcgggtacttgttcaatcgtcatcataaacatcgcctttctagcagctatgtatctgcttacattcctaatttaacagatattatcaaaatgtctagtggatctggttgaattaatcgcgctttgcgcgaaatttcgctataataagtgcaatcgtttaaaagtggaggataaagagatgacctattcagaacaatgggatttagaaccgatttttgccggggggattgattcaccagcgttgacgcaacgattggcggatttgactgcacaaatgacgcccttattagaagcggtccagaactggacgtttgcgacagatcagccaacatttgcaacgctaacgcaaatcactgaacagttacaagcgattgaagcgggtctcaagcaaacggggagtttcgtgaatatgattcaatcaacggatgaacgcaatccgcaagttgcaccgatgatggggcggattaatgcgcttgaaaatgatgcgaatcagattgatgtcgcactcacaaaaaaattggtcgcaatgtcagacgcagattttaaaaccgttgtatcgacacctgccttacaagcgattcagtttaatctaaccgaaaaacggacgaatggtgctgaacttttggatgaagcgacggaaaaactaattaaccagttcgcgttagatggtttaactggatggagtgatcattacgactcattggttgctgaaattcaagtccccgatggtgagacgactttatcggcgggacaagcgcagaataaatttgaatctgatccagatcccaaggtacgccaacgcgtctttcaaaattggtaccagacttgggatcggtattcaccattattaacggatacgttaaatcatttggctggcttccgcctaacggattatcaagcacatggcacaacggactttttgaaaaagccattggcaacgagtcgcatgcaacccgcaacgttagaagcgatgtggtcgatcgttagtcaaaataaagcgccgcttgtcgattttctaaatcggaaggcagcgttaatgggcaaagaacagcttgcttggtatgatacctgggcaccagtggttgtaggtgattttcaaccgcagcgttattcttatgatgaagcagcggattttatcatgcagaactttaaagcgttcagtcccaagatggcttcggtggcacaaaccgcgtttgaaaagcgttggattgaagctgaagatcggccaggcaaacaaccaggtggttatatgactgatttacctgaaacggatgattttcggatttttatgacatttgatggcacccccaatggtgttgcaactttggcacatgaattagggcatgggttccatacaatgatgattaatgatttaccaagttggcgacaagactatgcgatgaacgtcgcggaaacagcttccacttttgctgaactaatcgtcagtgatgcgactgttaaagcagcgcaaagcccagcagcgaagattaatttattggatcagaaaattactaacgcaattgatatgtttatgaatattcacgcacggtttttattcgagcgacatttttatacagcgcgccaaaatggcctgcaaacaacagctgatttaaaagcactcatgctagccgctcaaaaagaagcctatgcggatgcgttgactgattatgatccgctattctgggcggacaaacagcatttcttcttcgatgacgtgccgttttataacttcccttatacgtttggctatcttttttcgatggggatttatgccaaggcacagacaatgcctgattttgaagcggactatatcgcactattacgtgatacggccaatatgtcgactgaagcattagcgcaaaaacatcttggggttgatttaacccaaccggatttctggcaagctgccgcggatagcatcgctaaagatgtacaacaattcctagctttgacggcggactatctcagataatgacatgctatttttaaattggtatatcatggtataataaacgagaatcgggcgctcacactagttggagtgaccaaattgatcggaggttttgaaatgccaacatatgaaggtagcgatattcaagcagcggtaaatgaagggttgcaagccatgcatctaacgcgtgaggaagtgtccgttgatgtattggaagccggcaaaaaagggtttctcggttttggtcgccgcttagcagttgtccggctaacgccaaatgaacaaccaagccaagttaaacaaagcgccccagccccagttcaagagctagttgaaccaatgccaacaaataatttaactagtacgccgcaaaagcggaaaagtggtgcggaaacggaagctgagttaagcgcctatttggaagccatcacggctcaaattggcacaccggtcagcattcatgtaactcacgaccatcggagtacgacttatcatttgaagaccgataaagaaggcttgttgattggtaagcatggtaagacaattaatgcgctccaatatttagcgcagacttactttgatcatcatatgaagggcaagcaaaccattatcctagaagttggtgattatcggcagcgaagagcagcgattgtcagccaccttgccgataaagcagcccgtgaagtcgttgcgaccggcaaaccagtctttttagaaccaatgccggcttttgaacgcaaaattgtgcatgggcatttagcaactaatcaccatgttcaaactcattcagaaggccaaggcgatcgccggtcaattgtggtggaattagcgcgcacattttaggtgttgtgaattgacgctctaaaaaaatcgtgtataatgaaactaattaaatatcgataaagtagtgaaagtgctttgtccaccccttacgcaatgacgggaggggtggacgctaagcgctttttttatgcagctatttcggaaaggaagcatttaaaatgccaacgacagtcacagaatttgatacgattacggcgatttcaacaccacctggtgagggggcaatttcaattgtgcgtctttcaggggatgagagtttagccattattaaacgcgtttatcgcggcaaagatcttgatcaagtggcgagccataccattaattatgggcacattatcgatcctaaaaccgacgcagtagtcgatgaagtcatggtgtctgtcatgcgcgcacccaaaacgtttacccgcgaagatgtgattgagattaattgtcatggcggaattgtcgcaacgaaccgcatcttacaattattaatgagctatggtgcacgaatggccgaaccgggtgaattcacgaaacgagcctttttaaatgggcggattgatttaacccaagctgaatctgtgatggatctgattcgggctaagactgatcgggcgatgcaagttgctgttgatcaattagatgggagtttaacgcacctgattaagaatttacgccaagaaatcttagaagtattggcgcaagttgaagtcaacattgactatcccgaatatgataccgatgaaatgacgacgcggattctacttgaaaaagccgaacttgtgaaagcgcggattggtgaactacttcaaacggcacaacaaggaaaagtcttacgtgaaggcctagcaacggccattgtcggacggcccaatgttggtaaatcaagtttgttgaatcacctattacatgaagataaggcgattgtgacggatgttgccgggacgacgcgtgatgttttggaagaatatgtcaacgtccgtggggtaccgctgaagcttgttgatacggcaggaattcatgataccgaagataaggtagaaaagattggggtcgaaagaagtcgcgcagcaattaccaaggctgacctgattttattagttttaaatcaaagtgaaccactaacggttgaagatcgcgagttaatcacggccaccactgataagaaacggatcattattttaaataaaaccgatttaccgaacttgttagacttaaatgaactccaaacattggtgaatgcggatgaagtaattcaaacttcaattttaacaagcgaaggggtgaccgatttggaagcccaaatcgccaaactcttcttcggtgggattgaaaatagtcaaagtacggtcatgattactaatgcccgccaaattggtctattaaaccaagcacaacaatcattagatgaagtcatcagtggaattgcagctgggatgccagttgaccttgtgcaaattgatatgaccaactgttgggataagctcggtgagattaccggggattcagcaccagatgaattgattacggaactctttagccaattctgtttaggtaaataggtcttgaaccatattaaaggagaacaaaatatgcgagaatatgacgcagcgcactacgacgtgattgttgttggtgccggccatgcaggttctgaagcggctttagctgctgcacgaatgggccgcgaaacattactattaacgattaacttagacatggtggcttttatgccatgtaacccatcattgggtggtcctgctaaagggattgtcgtccgtgaaattgacgccttgggtggtcaaatgggccgcaatattgataaaacatacattcaaatgcggatgttgaatacaggtaaagggccagctgtccgcgcgttacgcgcccaagctgacaagcacgcttatcaccggacaatgaaacggactatcgaaacgacggagcacttaacacttcgtcaagggattgctgaatcattgattgttgaagacggtgtctgcaaagggattgtcactaacactggtgcccgttacagcgctgatagtgtgatcttaacggctgggacagcttctcggggtaagattattatcggcgaattaacctattcatctggtccgaataattcaattccttctattaaactttctgaaagtttggaagacaacggatttgtcctcacgcgttttaaaacggggaccccaccacgcgtggacggcaccacgatcgacttttcaaagacggaagaacaaccaggggataaggaaccaaaccactttagtttcgaaacacctgatagtgcttatttgaaagaccaactttcttgttggatgacatacacgaatgatacgacgcatcaagtgattcgcgacaatctcgaccgcgccccaatgtttaccggcgtaattgaaggggtgggtccacgttattgcccttcaattgaagataaaatcgtccgcttcgcggataagcctcggcaccaaattttcttggagccagaaggccgcgaaacagaagaatattacgtcggtgatttctcaacctcaatgccagaagaaatccaacacaaaatgattcattcgattgaaggcttagaaaatgcccaaatgatgcgtcctggttatgcgattgaatatgatgtcgttgaaccatggcaactaaaaccaacccttgaaaccaaagtggttgaaaatctttatacagccggtcaaatgaacggcacttcaggatatgaagaagcggctggtcaaggcttgatggccggcatcaacgctgctctgaagcaaacgggccgcgacccattcatcttggaccgcagtgaagcttacatcggggtcttaatcgatgacttggtcacaaaggggacgaaggaaccttatcggctattaacctcacgtgcggaataccgtttgatgcttcgtcacgataatgcggatttacgcttaacagaaaagggtcatgcattaggcttaatcaatgatgatcgctttgacagctatgaagtgaaaaaagcagccgttgaagctgaattagcacgtttagcaaccattcgcttgaaaccaaccccagaaatccaagcctttttagcggctaagggtgaggcaccacttaaagatggtgttttagccagcgacttcttaaaacggccagaagtaaagtatgctgatttaatccaatttattccagcagtcgaaggcattgataaccgcgttgtggaacaagttgaaattcaaatcaaatacgcgggttacatcgataaggaaaaagctaaaattgcgaagttaaaacgaatggaagctaaaaagattccagccaatatcgattacgatgcaattgaaggccttgcaacagaaggtcgtcaaaaattacaaaaaattcaacccgaaacacttgcgcaagccagtcggattggtggggtcaacccagccgatatcgggattctaagtgtctatattcaacaaggtaagattgctaaggtcaaatagcctggttgataactagtcattagatatgttagagttaagcatatattgtcaatggtagaaagccagccgtttcacatgaaacggttggctttttagagtcatgaaagaaaagtgagggaatcaagtgataactgttagtgaaatgagcttaacgctttctgggcgtaagttatatgaagacgttaatttgaagtttacacctgggaattgttatggcgtgatcggtgccaatggtgcaggtaagtcaacttttctaaaattattagaaggtaaattacaaccatcatcaggccatatctcaatgggccctaatgaacggatgtcgagtttgaaccaagatcactacgcttttgaagaatttgaagtgttagagactgtgattcaaggtcataagaagttgtatgaagtgatgcaagctaaggatgccctatatgctaaagctgatttcactgaagaagatgggatgaaagctgctgatttagaagctgaattcgctgaaatgaatggttgggatgctgaatcagaagctgctcaattacttcaagccttagggattgatgaatctttacaccatgtgaagatgagtgaattgatggaagggcaaaagattaaggttttacttggtcaagcgctctttggcaaacctgatatcctattattagatgaaccaacgaatgggttggacagtgcctcagttgaatggttagaagatttcttagcagacttcccgaacatcgtgattgttgtttcccatgaccgttacttcttaaaccaagtctgtacaatgatgtgtgatgtggacttcggtcgcatcaagacattcgttgggaactatgacttctggttagaatcaagtaagttagccgctaagttacaatcaaacgttaacgctaaaaaagaagaacaaatcaaagaattacaagattttatcgcgcgttttagtgccaatgcttcaaaatcaaaacaagccacttctcgtaagaaacaattagaaaagattacattagaagatatccaaccctcttcacgtcaatacccattcattaagttcgatttcgaacgtgaattggggaatgatcttttacgggttgagaatgtttcaaaaacaatcgacggtgttaaagtgttagataacatcagcttttcagttaagccagacgaaaaagcagcaatcgtttcacgaaatgacgttgcgacagctgtcttaatgcaaatcttagcaggtgaagtgcagccagatactgggacagttacctggggtgtgacaagtcaacaatcatacttaccaagagatacgaactcagccttcaatgatgatcaactcatcatcttagactggttacgtcaatttgccgctaagggtgaagatgacaatactttcttacgtggtttcttaggcaagatgcttttctctggagatgaagtcacaaaagaaatcaatgtcctttctggtggcgaaaaagtgcgttgtattctatcgaagattatgttgcaaaaatcgaatactttactattagatgatccaaccaaccatttggacttggaatcaattacttcattgaatgatgctttgatcgatttcaagggtgctttagtctttacatcgcatgatcatcagtttattcaaacaattgcagatcatatcattgaagtatcagcgaacggtgttgtcgaacgtgctgaaacgaactatgatgagttcttagcacatccggaattacaaaaacaagttaaaaacctctacgcttaatagtagaaaaacgaaggcccctagtatagctaagggcctttttttattgttataagataattattatttatttacagaaaatccttgcatcacgggttgcaagttggtatactaataaagttgtcaaaagcgagctgattagtgataagcagtatcgtcaattaaataaaaagttttgaaaaacacttgttatttaattgaaaacatgataacatattatatgttgcttaaggagttataacttctaagtaataattaattaaaaatagttgttgacaggcgataagttgtgtgatataattaaaatctgactgtggtattctgttcttgcatcaagacaataacctctttcattgtttgtgtaggaacatcaatgataacagagattcgtcttggtgttttttattttatcaattagctaaaagtatttggctaacttgattataaaacgcgcgatttttatttggaggttcttattatgtttaatggtctattcaaagatctaacaccaaggtcgtttactggtactgcgtcgagttattattagtatcgtgggtctctgtgtcttttcagctttctttattatctttggtgctaaagtaacttttgaaattcttgcaatatttgctcgagatacgactacatttgtcactgtgttgctttacttgctttcattatttatttttttaatcgggttcaaaaccaagattactcaaattagtgttgttacagcctggattagtgaagtacagtttttatttttgttattctcgccaatttggcaaattcacgctggaagagaagttgcgttctatgttattttggctatgaggattctggtcacagtattactggcatttcttttgtatctatatcatcgcaacaataaagcaaatcgaaaataccgtcgataacttaatacaaaaaaataggctagcccttgagggactagcctatttgaatatcatcaataaaaatcgcgttcaaattgcattaaatcattgattaaagacgctgcttgcttcaattcagcatctttatatttttcggtcaccttatcaataacttgcgctttcagcgtttcatgcattttatcgtggctttgcgcaattacacggcctttagcggtcaaagaataatagatttttttctgatcatctggttttttagtcgcttgaattaagcccatttgaatcaacttcttagcggcgcgtgtaatgccgccacgcgtaaccgccaaccgatccgctagtgctacacctgttaattcttcggcctctaatcctgataatatgtgcaatgcaatgattgatagctgcggaatcatcgttttcaagttctcatcactcagctgattttgcaaccatttttgttcttgaacaccgcggccgttgacactatctgagcataattgcttgattgcatgatagagtgccatcactgattcgttttccatttgcttaacctctcatcaattgttaccaccagtatacaccaaattagaatactttagctttggtcgtcgcttccgttagggtccgtgctaatatttgttcacgttgatctgcatgagcatccgcgtcttcaatatagacgtgttcaacttgattaacaccatagaatttcaacatattggttaaatacatatcgcctaaatccataagtgcagaactttcgttactcttaatcttaaataaacggcggaacaagaacttaacgatcccccacttgcccccagcgtgataaacactgccagctgcttggatatggattgctttcttaccttctaacaaacctactgaaccgttcggtgtgtatttgaatgttttgtgggcgaccgccgtcaaatctaaatattgtttcatctcagctggtaaaaaatgattgtacattggattgatgaagacatatttatcagcttcgataaattcatctaaccaatctgcgtgttgttgtaatagtgttttctcagcttcagccattggttcgtcaaatttttgtttacgccatgcagccattgtcatatcgttcaatggtggaacacctgcttcagtatatagatctcgaataataatttgatcatcaggatgggtccgacgataagtttctacaaagcgggtccctaccgctagggataaactcttttcaacatggggatgtgcttggattactaataatgtactcatttaaaaaaaccttctttagtttcgtttagttgcttgtcaacaaaataaagattatcatcgttttagttgcttgtcaacaaaatgttttaaattaccgttagctatcaaatttagctgaagtgtcctagtagcgccctaacgtgtcatttttaagcaaaaaaaataggctatcccttgagggactagcctatttgagtaagcttattaaacatgctttttaaagctgactcctgcgcttagctacaatccgcaaacaatcgactaacgtcgattattcacgaatttaggctaatgctcagaatcaacccgctttaaacacactctttaataattagtttaatttcttcttgcttacaacattcaagttttcgtctaaatcataaacaactggttcgcctgttgccatttcaacgtccatgatgtcttcatcagagatgttttcgatgtattttgttaaggcgcgtagtgagttaccgtgagcggctacaatgatattttggccgtcgattaattttggagcgatttcgtcttcccagaatgggataacacgttccaaagtaaccttcaagttttcgccaccaggaattgcttttggatctaagtgtgcgtaacgacggtcgtttgctgctgaaccttcatcacttgcatccaatagtggaggaagtgtgtcgtatgaacgacgccagatgtgaacttgttcgtcgccccatttttcagctgcttcagctttgttttggccttgtaatgcaccataatgacgttcgtttaagcgccatgatttcatttctggaacccataattgatctgaaccttcaagtgcatagtgtaatgtcttgatggcacgagtcaatactgatgtgtaagcttggtcaaaaaggatgccttcttttttcaataaagcaccagcgttttgagcttggcgtacgccttcttcgcttaagttaacatcaacccaaccagtgaattggtttgataagttccattcactttgtccgtgacgaataaaaactaatttagccatgtgtaagtaacctcactttttttatttttactctgttcattttacactgtttgctacacaatttacagtcttatcttttcagaaaataatgaaccttctttttttatgctcgatcagtcgttttcgtttctttcaataagaaaagcgccgccaagatggcaatcaccatgagcactagcgacgtcgttacaacagcgatcatccctttatcaaaagccatgacaacaatttgttggacctttgcggcatacggtgtcttcactaattgttgcccccacgcgattgcatgtcctgaaaaagcacctgcttcaaccaatgcttgctgaatgccagttgctgccgccttcgggattgagctgccactaaagctagtcttcaaactcgtttcgtaggcattcgtttgtgataaaccgagaatcacaacaccgacggtaattccaatttggcggaaaacattcaataaaccggatgccattccgatttcttgaggattaatattatccatcgccgctgtattgatcattggattgataatcgcattgcctaacccagttagcgcaagcaatggtaagagttgcatataagtaaaatcagtcgttgtcacttgtctaaaaattaataaaccaagggcagaaacagtaaatccaaaagcaatcaaccattttttaccgaatttatagcctagaacacccgtgaatggtcctaaaacaagggaccataaactcattggcagttgatgcacaccggttgaaaaggctgagtaacccatgtaattttgcatcaaactcgtttgataagcggctaaggcaaaaataccagcgcctaatgagaaagctaaaatcacaacacccacgaaatggcgattcgtaagtaacgtcaagttcatcattggtgcttttgctttcaattccacaaagacgaaaagcgctaaaattaaaacggaagcaactaaccaccccataatgcgcatatctgtccaatcccagtgcatatgttgttctttttgaatcaacccataaatcccggagaataaaccaattgctgacaagatcatccccataaaatcgattgattcgcccgcgccataagctggtgtttctttaacattgcgaatcactaagtaaactgaaataatcccgactggtaaattgacgaaaaagatggatggccagccgaagttttcgactaaaaagccccctactaagggtccaatagcagttgaaaaaccaatcacggagcctaaaatccccagtgcagtcccccgttcacgcccttcaaagttcgacgccactagtgccatcgataaactcatcatacccgagccaccaatcgcttggaccgcgcgcccgatatctaataccaataaatttggtgccagtccattaacgacagaggccgctgtgaataaaatcatactcatgataaaaattttcttgcgcccgaacatgtcccctaatttggaaacaatcaacaagctgaccgcgtacatcaacgtataagcgttcaaaacccattgtaagttgctaaaagttgttttaaaatcaatcgccatacttggtaaagcgacattgacgacagttacgtctagcaatcccataaagacacccagactcatcgcggccagcgctatccagcggttggttgtttttttcattttactatctccattttctctatctcatttatttgtgcttgtagccaatccattttggctttgatcgttgtgattacgaaatcggttgaacgaatctgccaataataataatccgtcattgtctcatccgcatcttttaattcagttagatgtttttccacaccgctataaacatgtaaatcttcagccaactcactgtagaaatcttgtaaaatgctgacttgttctgctgcatcaatgtagtgcatcccccgcatcttaaaacgataagcatcatcccacttcgcatcatgaacgactggtttagccattaattcagcaaaatagcgccgtccctcttcagtaatgtgcgcaatcttcgtaccacgtgaatcctgatcagcttcctcaaacccaatgcagcctttgctttccaatttatctaacaacggatacaaaaccccatttgaaattttccgtctgggtaccatcgcattttccaagataatccgcaacttatagcccgacatattccggctcattaaggcggataacatcagcaattcatacataaacgcataacctctctctttaatcagtcttttagacaggtctttaagacttattaagtatagttctttccgacatatttacaagcctttttttcatttttagacaaataaaaaaacatgatccgcataagttgcctgataacaaggcttcatgcggatcacgcttttatggatttaggggtgtataggttgtacactctctctttcaactaattcaattgaaagtactttttgttgtggcgcaatagcaggctccacaatccggttcaataatagacgtgttgcttcttgcccaagctcgaaaatcggttgcttaatggtcgtcaattttggtgtgacatattcacaccaatcgatgttatcatagccaatcactgagatatcttctggcacctgtactcgtaattcacgtaacccacgaatcaatccgatagcgagttcatcattgattgcaaatacagcagttaccccgctatcaatcacctgtcgtgcaacttggtaaccacctaatttcgttaacggtgtcgttatttgccactcatccgccactggtaattgggctttcaacatcgcggcttgataaccaatgaatcgttgttcgatgttccaagctcgttgttctggtaaaacaattccgactttatgatggcctcgttcaatgagataccgtgcggccaactctccaccttgcgtatcggcaaccgtaatttcatctcccgcatgttgtttatctgattgatctaataagataaacgggatttgtcgtttttgcagatagctatccaacgttgttttttgtaaatgagggacagccaaaataaagccgtcaacatttcgacgaaccaattcctttaaataatgatcaactttctgattatgcgcccctgcactataaattaatgggatgaaatcgaattgataggcaatttcttcgacaccttgaataaactgactaaaaaaaggattattgatatccggcaccaataccgcgatcgtcttcgtttctttattaatcatattttgcgcgaaataatcaggttcatactgaagtctttcccgagcggctttgacccgcgcaatcgtttctgcgctaaagcgctcacctttattattaagaattaacgaaactgttgtgaccgatgtttgcgccagcgcggcaacatctttaatcgttacttttcgaaccattttggcactcccccgaatcaaattaataaaaacacccacagccggctagccatggacgctgttaatatgattataactgaatatccttttcataaggaatcgaattttgcgcccctttagtttggactgcaatcgaagaagccttattggcataagtcattgctgcttcaatgttactgtaatccaattcaagtttcgtacttaaagcaccgataaaggtatcaccagcagcggttgtatcgactgcttgaactttaaatgccggtacaaacccggttgttgttggtgttgcatagaatgagccctttgccccaaccgtaatgataacgactttaatccccatcttaaacatcgcttccacgttagctttcattgatgcttcgtcagtcactttaatccctgtgataatttcagcttccgtttcattagggacaatcatgtccgtcactgccaataattcagctggaatatttttaatcgctggtgcagggttcaaaatcgtttgaacgccgtttgaacgggcaattttgaaagcttcaataattgcaggaataggtacttcgaattgagcgacaattctgtcagcatctttgatggcttcttcggcttcatgaatatcatcgactgtcacatcttggttggccccaccatagattaaaatactattttgtccactagcatccaccatgatgtaagcttggccagtcccagctgtttcagaacaacgaacgtgatcaatgttcatgccatcttttttgaacgtatctagcatgaaatcagcggcgccttccttaccaaccttactaatgaaagctgtttgcgcacctgaccgaacagctgcgattgcttggtttgcacccttaccaccaccagcaactgcgcggccatccattgctaatgtttcacctggttgtggaaaacgctgaacgtttaaaattgtgtcgacatttgttgaccctaatacgattacttttttcatttgaaagccctcctaatggttaaaatacaacgccactttctaaaataatgttggaataaggtgtcatttcacccgtccgaacaaatgctttggcctgccccaagtcctgtttcatttgtgcgtgatcaataaattcaatgggcgtctcaccaatcacttttttgatttgttcaagttgtgctggattagctgttttaatttcgtttgctaagtaaactttttgaatttccaattctgttagaacatttttaagtacttgaataaaacttggtacaccattttcgatggccacatcgattttttgcgttccagctgggaccggcatcccagcatcgccaatactcattgtatcaaaatgccccatgtttgaaatcacatttgaaatttgtgaattgataacttgtgtttttcgcataataaatccgccccactttttatttgataaaggctgtcacagatccagccactaatacgagtactaaaccaattaatacggcaaccatttcttttttggtcttttgttctttcaacacataaatcccaccgattgtggcgaaaatgacactggtttgggataaaacaaaccccgttgctaagccattcacagaaggttgtgctgagataagatacgtcagcgctgcaaacgcgaagaagaacccactgaagatattcttatacgaagttgcttctttgaaaggttgataagtcttgctggtttgggttaatccgaagataacacctacaattgccattcctaatgcttgtggcaaaaagccttggaaaccgtccgcgtgtactgcttgtggaaaggcggagtaccctaggtagcctagttcgccaactaataataacaagatgccacgcaccgcgccatttttactagcgcttgaacgatcttcactccaggctgttaaataaacaccaaggataattagaataatcgctgtgaacccaatcaacttcgattgtgtacttgcccagttacccaagatgaagacgccccacaaagatgccccaacaagttggaacccagttgtgattggcatcgttctagaaacacccatggtttcaaaaacatgaaaggtgataatctgcgctaatgcccaacaagcccctgaaattaaacaaaaaataaatgttttggtttctggaatcggtgtcccgcggaaaatagccacaataatggccagaattaatgtcccaagtgtcgttccaataatttgactcgctggtttcccaccaattttaccaacgatcacagggaacaatccccaaccaatcatcggcattaatccaattaagatattgacagcattcatattcaatcctccgtcctttattctaggctagtaaaacgttttactaactatcatggtgattattataaaggagcttctttgagaattcaactcttttttgtaaccgctttattaaagaacacaaaaaagattaatctggcgcgcatttggcctgattaatctttttttaatttattttttctttgcttgtccgtatcctcgtttagatttataacctgcatctaaaatttgacacatttcaacataatgtcgttgctgtgtttcttcagctttagcgccgtaaacataacgtgcccattcgcgttgatagcctggtgttagtgcgtcgaaaaaggtttttgtggctggtgtatcttctaatcgagcactcaatcggggaatctcaacttcatattctgatagtggtttttgtggcatggtgcataactcccttattttaaccgcataacatctctggcaatcatcaactcttcattagttggcacaatcaggaccttaacgcgtgattgatcactgctgataatgcgttcttggctgcggacattatttttatcttcatccaattctacaccaaaacaagcgagttgttcacaaatggcagcccgtaattcactgccgttctcaccactaccggcagtaaagaccagcgtatctactccattcattaaagctacgtaagaaccgacatacttcacaactcgattgacaaaaatatcaagcgccaattgggattgtggtcgtgagtcagcggtttcttctaaatcacgcatatccggtgatagttcagaaatccctaataagccagacttatggttcaaaattgtgatcatctctggcattgtcttacctaatttttcagctaaaaaggctactaatgagacatcaatatcaccagatcgcgtgcccatcgtaatccccgcaagtggtgtgaaccccattgatgtatcgacagcgtgcccgtcttgaatcgcggtaattgatgcaccactgcccaagtgcaacgtgatcattttttgcgtttcaagcgactgatctagcatttcagccgctcgatgagcaacaaaccgatgactggtcccatgcgcaccgtatttacgggccccatacttttcataatacgcttgcggaatactgtataaatagttttcggcaggtaacgtactgtaaaatgacgtgtcaaaaacagccacttccggtacgcctggcaataatgcagtgaaaattttaatgtaataagcttgggttggattatgcaatggtgcatattcagccaaacgattaatctcatcaagcccgaccggattaattactgcagagtccttgaaggcttctccaccagcaaccacccggtgaccaacccccgtaatctcatcgagatgggttacgatatttaattccttcaaccgcgttaataataacgttgctgcttgttcgtgcgtcgtaatatcttggacttgtttaaacttttcctgattgccatacttcactgtgaatacagaatcagataagcctaaccggtcaatcattcctttagcgattactcgttcagacggcatttcaaataattgccacttcagtgttgaactacctgcattaatagccagaattttttccatgatatcgactcccactctttcataatccgttcatggcttaattgtaagcaatttcataaaaagaaacaagccctattatatcagagtgcgtcatcaacgggtaacttctgagcatttatctaacttagcgaattggcgatgcaatcgccgatttgataagtgtagcaaagcacaggaagttattgatgaaagcacgtttaaggcaagaatgcatttggttgcggtcagcaactgagcattaatacaaactagcgcttaatctcgattttaagattaagtgctagtttagattaagcggaagttgttgcaaccaaaaagcacgttttatccataaaaaaagaaccgcccccacgcggttcttcctatttcataataactattctgcactttcttcgttcattttctttactttatttaggaatgaacggcccatcttgttatcttggtattcacttggttcaatgacatctaaatagaattgatcaatgaatcgaatcaaaccatcgactttatcacggcccatttgtgcttcgatttcacggtatttttcaacatagcggctcaccaaccggtctaaaacgtcttgaccttgtttagttaagctcaaaaatttaacccgttgatctgtttgaagatgttcttcaaccacgtacccattttctttcagtaaccgacattggcgtgaaattgctgaacgactaacactcatcgtcttagctaacttactacctgttaagttttcgttagttgaaatttcgtacataattaaaaattggtcaaaagaaactttgtaatttaaactttctccactgacaaagtcgcttaaattgctgacaatccaccgataaatcaatgaaagatgcgttactacttcccaatcatcagaatacttgcttgttgcttttgctgtcataaccttttctccctttactaaccgatctgtcatgcgtagaaacaattaacggatttaatttattttgctatcaatatattagcatattttgagagaaaagaaaccactcgattcattaaatagctataaatagatttgatgtgcaacaattcaattgaccatataatcatcaacccactatattagtttgtcgtgactatataaaaagaagtcattaaagataaaattattttcatccttaataacttcttttaataacatcttataggttacgatccatattgaacgtcaatttcgataaattaatgcccgacataacgagttccccaatcatcgaggtcgcttcagtcgccatctgcttaacaatcgcatggttttgctcagtcaaatactccgttaaggcagcgccttgatacttttgtgcttccacttgaatggcttcaatcatcgttcgcaattcttgcttacaacggtttaagtaatctacattgccttgaatgtgctggctataatggccttccaccaatactgaaattgtccggtataaccaatatgcactcttcatatcccatttcattggtgtttcgctgaaacttagatccgtatcgttcgcattcgtgaaaaatggaatgaacggtgtatacgttggcatccccattgtgatccacatgatggccgcttgttcctttggcacatcattccgtaattgtaaaatatgtgcattttgcgtccgattcaaaccgattgggcggtaacgatacttgtcggcatcagtcccatgccccattggatcgaatggcgtttcattataatgtgagcctaacaacatttcaatatcttcaacactaattttatgttcaatacgccgaataaatggtaattcagccgattcgggtgacatatcaaaatcagcatcaaataaatgatgggcgtaccaaacccgtggtgtattatagtgccggtctttttcattcatcgtgccaaaaatgtggcggaaattccagcccgttttatccggattcaaatgatgggcttcaacgtattcttgaatgccttctgcccacataaaattgtcggcatccgtgaaatcaacttgttgaatcgccacttggttggcggcaactgcataagcatcatctggaatccgttgtgctagccataaatgccctgtcacaatttccatataccacacttcattgtgatcactaaagagcacactattgccggcgggtgagccgtattgtttaatcaaattaccgagatagctgaccccttcgcgcgccgagttaatgtacggcgcaaccatagcttgcatgcaatcttcatccaacccgtctttcaccaatggatcataagcgagggctttttcatttccatatgtactttcggtacagctcatcgccacgttaacttcgttaatactactttcatcataataaccattatgtttgtaatcaacattcggaacagcgggccatcggtagccattctcaggtaattcggcttcaaacccgtttaaccaagatttaattttagcacccttacgccctttaacagctggattgatgtgaaaccgttgtggtgttaaaggtaaaaaagtatcgtcgttacgcgcaatcatcgttgatccgtccaatgatgcgtttttaccaactaaaattgatgtacatgctgattccataagttgcactccctctgatgaccactttaattgaactcatcggtcacgtttgattaaaattttctcataattaatatccatagtgtacgcttctcacttgcgaaagtatagcctgatttgttgattaatttcctttaacccccgcatttattgcgatttctatacaatattggatttcacgttaatttccgatttcggaattatcgtcaaacgaccatgttagcgctcctaatttcatgatatattattagatgaataactaacaacaaggtggtttctcaatgaaaaaattaacacttgctctgttgctgaccatgaccagctgtttcatgattctagctggctgtcagaataaaacagaaattccagctgccgcaactaaaacagaagaaaaaattgatcaatacgtccaaaaagtgaaccaactctatagtgatggttcccgtaaagatcctgcgaagttaacagccaataaacaacaccaaattatcactgcggctgacaaactcgacaaacaaatcacgcccaacctttatatgagcggaattagcgctgatgcaaaggctgattacaaggctgcccaagaagatctagataagattactggtaagcaaccagcaactagtgaatctgaaagtgttgcttctgaaaagcctgctaaaaagaagaaaaagaacaaagttaaaacaagcgcctttttcgataaagatgggattgtcaaagccgatgcacaacttggtgaagaaacggactataccgaccaccccaaacaacttgctgattatcaagaagctaaaaatcaattagcggctatggcagctgtccggaacttatttacagacgacaacctcaagcatattccagctaacctatctgctagcgacttcccttacgtccgagctttgattaataaatcaacccatgacggctttaaagaaaagtacttggcgtatgttaagaacgctgaaaatcaatacaacacttactctaacaatacccaagcggcaaccacgcaaaacacaacaaccgctaatcaagcaacaactaaccaaaacacagctaccaatacacaaactacgacaggctatgctgctaacacggcaacggggaatggcactggtgcaacaactggaactgggacggggacttcgacaacggataccacaaccggaaccgggacgactggtacacaaagtaatactcagaccggtacagatcagacacaaaccggtacactccaataatcttaagacacttcctaaaaagtacgctatcttcttgatatgcgtacttttttgacgttcgcttacgtttagtcttttaatcgccaatatcttaagaaacatgtaacagcgcgctaactattatgtaacatgtttgttactttcagatgctatgctaatcagcgtactaaattaattcaaaattcaaacaacttaaaaaaattttcgaaggagcacaacaaacacatgaaaaaacaaaaaatgacttacttatcttctggaatggttggccttgccggcttagtattgatgggtcttcaaacaaatgatgcccaagctgcaacaaatggtacggttaactacgctgacggggcaacaaccgtttggactagcccagcagtaggtcaaaaacctgctcgttacttggcaactaaccaacaagtaacaatccaagacacaaaacaagtttacggccaaacatggtacaaacttggtaatgacgaatgggtttcaagccaattcattacagccggcgatgcaactgctcaaccagctgcaacaacaaccgctgttaagaacacagtaacagctaacttccaatcaggtgcaacaactgtttgggctgacacaactgctgctcaaccaactggcgaatacttaacatatggcacaactaaaaacgtcattgatcaaaaagatttaaacggcacaacttggtaccaattagaaagcaaaggttgggttcctgctagctacgttgttttaaacaaccctaacttggatggtgtcacaccaattacaaatgcacctgcagtgacaccagtcgctgcaacaaccactacaactgaagttcaagcaccagctgctcctcaagcaacaacgccggcacctgctacagaaacaccagcgcctgctgctacaactgaagcaacaacccctgctgctacaacaagtacaccagcagcaacaacacaacctgctcaaacacaaacaacgacaactcaaagcagccaacaaacaactcaagctacaacaactcaacaagcaccacaaacgaatacaacgacaaaagcaagtggtaacgcacaaactgttatcaacgctgctttatcacaaatcggtacaccttacgtattgggaggctcaacacctggtgttggtcttgactgttctggtttagtgcaatacgcatacgcacaagctggcgtttcattggaccgtgtcacaactgctcaagaacgtgctggccaacgcgtctcacttgataacttacaacctggcgatatcctcttctggggtggcgctggtgcttcataccacgacgcaatctacatcggtggtggcaaatacgtccacgcaccacaacctggcgaatcagttaagacagcaagtatctcaagctacttcatgccttcattcgcagttcgcgtcctttaatcaaaaatatgtatttaaaaagagccacatcttaggatgtagctctttttttgtggttaaacttagtttaaaatatatttattttccatattaaaagaccatccaaaggctgcttttcaagcgacttttagatggtcttttaacattattttgaaaaaaattcattataattatttagctgatttacgttccttcaagaagttcaatacagcagctgtttcagcgttacgttttttagcattgttttggttaacaggacgacggttaccagaaacactaacatgtaagttttgtgacattgcgcgtttcctcctttcgtgcatatattctattattctaatctgaattgacttatttttcaagttaactttattcgtcttttggttttctgaaatagtttaggagccaactggtcagcggaacggttgctatgaccccaatcactccgattaatagtgcgagtccctcaccaattaaaattttatggttcacaattttactaattggataaccgagttgaatgaaccacatcgttaatgacaagaagctaccgaaaaaactaaagaacagtgtgttaaaagccgtcgcaataattttttcaccgatcgcaatccccgctttaaagagttgcttggagcccatttgcgcgtcgtattctaagatttcgactaaaccactggcaactgcaatactcgtttcggcgattgcccctaagctgcccagaatgatcatcatgatactaattttttggaacgacaagccgattgcgagtccaaagccttcaatctcttctgcatcttccgcaccaaagccgtaggtagctgctaactggctgaggggcacaataatgatcagcaagcccaccaccacgattaacgacgtcacaaacgccgtcttggccgttaatggctgcttggtattcatgaagatggatgtcgctaacaaaatcagactcaacagaccactcacaatcagcggttcaaacccacccgccaccaagaccagtgccaatataatcacgacaaaattcaaaccaaggctgaagaaaatcgtcagcccttgccaaccacaaaccagcactaataagatcagtaaaattcccgttagcaacatcataggcgtctcacccgcactaactggcttgccaacaagctcgttactggcaccgccaaagtaatcccaatcgcactaatcaccgtctgcgtaaaacttaacgtgacagttcgcgataaggtatacgcaattgtgttgccattgcgtagatacaataaaataattggaaaagcatccgccatgactaaaaagaacaacacattaactaacggaccaataatttcgcgaccaattgcgagtcctgatttaaacaattcagtcttcgtaacgtttggccgttcaatcgctaattgctggagtgacgatgaaatatcggtcgtctcatccatcacagcgcctaaaatcccgagcacgacttccgctaagaagaccgttttatacggctgtaattcataggccatcgtttcataatgcaagccttgatcgccggttaatttcaagacggccatgctgagaaacagtgctaggaacgttgcgccaattgtcgcgccatatgagacaagcatctggcggttgggtcctaatactaaaagtagcgttaaacccgttagaacgaccgctaagccacacataatcggcaataaccaccgtccacccgtcatcgcgtttaaatggagtgttaagacgaatgcgacgagattgaccaagacactgattagcgtcatcaatccgcgcttgagcatcattagtaataggaaactaaacgtcaacagtgttaagccaacgatgattgtatcgcgcttaggctcgtttaaggtccactttttcaaatattgatcacggtgtaaaaagacttgttgtcctttatagtaccgcgtcgacatcgcttgcgacgccgtatacgtattgcgcagcgtaatcacttgccctttttgcttagtgttcaaaaattggcccgtgacccgctggactacttctgtatcttcattttggtactcatcagtctgtttctcacggctaattgtctggacccgcgttacccgaataatcggttgctgatacaaaccagcatcgaaatacgtccctaatacaccgaggacgcagatgacacttcctattagaccaatccacagccgtttatgttttaccacagtcgtcacctctgttttattctagcgtttctgcgggtgaacgtcagctttttgaggctgatttaatcattatttaagcgactattgaaaatcccatacgtaaagtagaccactaagccgatgacaaaccagattgccgctgcaatccaagtgacttttggcaattcaaacatcatcaataaacatagcgctcctgatattaacggtaaaactgggtaaaatgggactttaaacccatttttattcggaatgtccttgcgcttccgcaatgggatgaccccaatcgacatccagaaaaaagccaccaatgtgccgatgtttaccaaattagtcaattgatccagtgaaacgaacccgcctagaatcatgatgactaccgtcacaattttgatactgttagttggggtttgatgttttgcagtcactttaccaagtgcttttggtaataagccatcacgaccaattgaatagatgaggcgggaactgctgtaagtcatcgtcaacatcatcgtgaacatccctgctaatgcgccgagtgaaatcagaccggcaaaccaattttgatggacgacttgtagcgcgaatgtgaccggattagcaacgtccaattcgcggtacgacaccatccctgtgaggacaaacgccactaatatataaagcaacgtacagatgattaacgtcccaataatcccgataggaagatttttttgtggattcttaacctctgccgccgatgctgacacacagtcaaagccaaggtaagcaaagaagacgagtgatgcccctttgaaaatcccacttaccccaaacggcatgaacggttgccagttagtgggtttcacgtagaaaatcccgacactaatgaaaagtagcactacgcctaatttaatcaaaaccatgatgttattaattcgtgttgatgaacgagtccctcgcattaataatgtcgcaatcaagcccactaccagcatcgcaaacaggttcacataagtgccatgtgccggatcaaacgggccagtaattgcatgcggaatatggatgccaaacccttcgataaatgatacaaaataagccgaccaaccagttgaaactgccgcaactgacaacatatactccaagaataaagcccagccaagcagccaaccgattaactcaccaaaaataatattgccatatgagtaagcacttcccgcaactggtaatgccgatgaaaattcggcgtaacacatcgccgcaacggcacaaacggccgccgcaatcataaatgaaatcgtgattgccgggccactatgtaacgccgcaatcgttcccggtaagataaaaatcccggtcccaatcactgcccccacgcccaatgcaattaaatccttagccgttaatgttttggccaaccgctgatcttgttgtaaataacgttccagtgattcttttcgtaacatctttgccattaatcccattttaaccactcctatttttattgtatgcactcgactaggcgattactcgccgcctaccaggcttcgtcgcacttctttaacgtgctccttgaactgccttctgcgcttaactacagaatcacaatggcggtcgtacgcccaccattgcgctttttaggttatgctcgaagccaaatcgttcaagtcgcacttctttcttaacgtgctcctcagccagatacttccgtatagctacgtccagtaaacaaagctacaacccagctttattcactggactatgctattactcagtatctaaccaggcttcgtcgcactcatttaataacaaaaaaaggagcccactagtcttcactagtgagccccaccaggaagatgactcggggttacccagccatcttccaattcattaaggtttgtcatttcaactcaaatgccttctccttaatcaaccagtcgattactgggtatcttaaagaaaaagctaaaggcaacacgttgcattgaattcatgacagaccctccttgttattaattagttacttagtataggggataaccatctatttgtaaaggattattttaaaagttgtttttctaaaaataatctgctagaatcaaatttaacttattcaaaggatgtgactggcattgaaaatcgcatgctaattttctgacaactcgattggtacgaactgttcatgcacgtgcgtggaccgtttatttccgattgccgttagagattgcttgcgttaattttcaggtcagttacctaaagacttgttaaaagacgctgttattgcgtctttttttgtgcatttttaacgacaactgggccaatctcattcaatcaatgaggtgataattcatgggcacaattcaattcaaagcactcacatttaactattcagatcaaacacaaccgttgttcgatcacgtcacgcttcaattcgacgccagttggaaactcggtttaatcgggcgcaatggtcgcggtaaaacaacgttattaaaattacttcaacaccaactaccatttgatggccagttggttaccaatctcgattttcaatatttcccacagactgttacagaacctacgcaactcacacgcgatattctaatgcagctaggtaacctcgacaattcaaccttctggcaagtcgagcgggaactgcggctcctacaagtcgcacccgaaatcgtctggcaaccatttgcttcgttaagtcctggtgaacaaaccaaaatgttactcgccttactattcatcgacgactatcattttcaactgatcgacgaaccaaccaatcacctggatcaagaaggccgccaagtcgttgccaattatttacgccaaaaagccggcttcattgtcgtcagccatgaccgccatttcttaaaccaagtgatcgaccatgtcctagcgattaatcgtgccgacatcaccgttcaccaaggcaactaccaaacttggcaaaccgcccacgaccaacaagctgcttatgagcaacaacagaatcaacaactcaagggcgatatcaaacggctgacaaaaacagcacaacaaaaagcgcagtggtcccacgaagctgaaaaagggaaaaacgccgccagtgtcaaaactgaaagtgccaatctcgataaaggcttcatcagtcatcgcgccgctaaggttatgaaacgggcgacgacaattgccaaccgcgcggaagaagcaatcgaagcaaaacaacaactttttaaaaacgttgaaattgctgcaccactgaccatcaatcagcgacccctcaaacccggtcaaaatgtgcttagtgttgatgaacttgtcttacaacaagacggcgtcatccttaatcaaccactctcattcaccttagaaactggtcaacaggttgccctaactgggattaatggcgcaggtaaatcaacactgattaaggcgttacttgcattacccgcaactgaccacattgccagcggtagtctgcaccttaatccgcacttaaccctctcgtatcttccacaagatttcgatcaactgagcggctcactggccgacttcgctgctgcgaaacaggttgatcacgaacaactgctaagcatgttacgcaaactgggttttgaccgcgatttatttacccaccgtctagaaacgatgagcatgggacaaaaacgtaaagctgcactggcacgttcgctctttgaagaggctgactgttacctctgggatgaaccgttgaattacctcgacgtcatcacgcgtgaacaagttcaaactctaattgccgagcaacgcccaaccctcctatttatcgagcatgatgttgatttcgttaacgccatcgccacccaaacctacgcacttcgaccacaacactaatacgtattatttgtataccgtgtcacgttatatccgcgcacgttgaagtaagtcgttggcgactcatcatcaaaaaaggccgggttcatatcattaagtcgcgtttcggtattggttaacgtttgttccggcagtgctaaattttcacggagccaattcgaagcagcctgcaaatcttctgtactaatgatttgataggcactgccgttaagccacgccgttttacctagcaattggctgctgacaatttcaccactactttgatgatagttgcgaatcaactgcttcacttggtcggctgtaaaatcagtgctaattttctgaccaagcttagtcattaagtcaccaatgttcatcaaatattttggcttttgaattttttgcgcaacttgtttcaaaacttcttgttgccgcaattgccgcccatagtccccgcgcggatcttgataacgcatccgactataagcaagcgcctgatcaccattgagatgatggtggccttgtggaatcacttgtccattcaaattaacgtcaatcaccgtatcgatggtaatccccccgacaaaatcaaccaattctttgagtgcgcccatatcgaccgtcaccgagtagtcaatcgggagccctaaaaactgactgactgtttttttcgccatcttagccttgccaatttcataagccgcattaattttctgaatattaccgccgtggtcatctgccatctctaccaatgaatcacgcggaatagagtagaccaccgttgcttcttacgccgggttaagtgttacaaccatcatcgaatccgacagaccacgatcaacgcgcccatccgcgcctgggtcaacgcctaataataggaacgagattggctttcgctgatcaatttgttttgaaattcgactagacccggttttaatcgcatcaacagctttatcctcttgatgcaaataaaaacctagcgtcgccagactaatcacaacaatactactgattacaatcacgatactgatctttttcacagtcaattcccctttgtttaaacgcccaccgcatccttttttagatatgaaccaataaatgctgtcccccttttgaatcgttcgattctggcggacagcattttattttaacctttgctttaaccgacgcaagccaactagcatgaccggcgctaagtgcgaccgattaagccatcgtagccaccgggatgtgccggttggtaaaccacgttctaaattgatcaattgcgtctgaatgaattgtcgctcaggaacagtcagtgtgcgctgatcaaaaacaattaacattctaaaaaaggtccgcacatactgctttaaaaatcgtgtgtaagctgcgcgatccacttctgcaattccagccactaattgcgtctcaatgatgtgcagagctgttaagttaactgagaaccactgcggctttagggtactcgtagccgcctcagcatgccctatctcgtaaacatataaaaacgctgcccgatgcctaacaactcggcaatgttgtaaatactgcaagttgaaaattaaatcctcaccgatacgcagcgattcatcgaaccgcaatgcttcagcttcaataatcgctcttcgatacaatttattacatgattgaaagaagacattttgataatagtagtctaaaaaagcccttttgccgtcttgtattgatagtcaccatcttcagtcaaaccaaaagcagaatccgttccgccggctctttcgattttagttctgaatagcacccaatctaccgactgaccgacgactggttcaaataattgggcactgttaaccaagaagtcatcggcattctcagcatcaagttaagcccataaactaatcagtcataaaaaggctgcatcaaaattacttttgatgcagcctctggttcaagcatagactaactacgctttgtttgttattaatctaatttccgttccaactcactaacgatttcagcatgttttgcttccgttaatttaatcttagccatgaagattaacgctgaaataaccaataacgccattggaatgaagaacatgtacattttgaattgcaacaaccccgcgttagtgatatcgcttggtttcgcattcccagtcatgccagcatgaatcgcagccgtcacaacgacgccgtttgcaaaagccccggctagtttatccaataaaggtcgcactgccaatgttacagattcattccgtgtaccacttttcaattgtccgtattcaacactatcggtaatcgtcatcaaagcagccaaaaagaccagtggatatgggaagaagaataagccgaccgcaattaagactacgaccaagttacttccagcaaacaagaagaggatataaccaagcatcatcattgcgattccgccaatatagattgcccggcgatgaattaaagcaaccaatgttgggaacaacgcaactgacacaatccctaagatggcagtaatcacaccaaccgttgagaacgctgcggcgcggcccatgacatatctaaaataatataaaagcagtgagttcgtaatcacataactaaaggcaaataagaaatatgaaagagataaccacattaattggtcatttttaccaatcacactgaaaacgtcacgtaaccgaaccttttcagtattttcccgaatagcactcttttcttctttggttcctaagatggtcgctaaagcgcctaagaatgaaacaaggccaatgacaacggcaaaaccgaaccacccggcactggtttgttcactcccatgactcccagaaaatagttgcgagaagaaaaccaccattggcacaatcacgataatgaccccttgtgcacctaaagtggatccgaaacgcgcaatcgccccgaattttgtccgtttttcagaatcaacactcaacgctggcaacattgaccagaacgagatatctttaaacgagtagaagatatctaaaatcacgaaaacgattgcaaaaagaactaagtaaagataagggctacttgtcgcaagccccccaaagttggtaaaaatcatggccaagccaacagaactaataattgaccccgccagtaaccacggtttaaatttcccccaacgcgtccgtgtattatcaaccactccaccaatcagcggatcgaaggcaatttcaacaatccgaatgaccatcattgtataagtgacatacgcaatcatttttgaattaaagcctgcatttttggtatcgaataattgactcgtgacgaacatcataaaataagtgctaagtgttgcataaaaggcatcatgcccaaaggccccaaaagcgtaagaactatactgtttaacatcttttagttttttcatttctttagattcctttcgatagtttcttcattgtaaacatgctttcatcaagcacaaccctcgggttatcccgcttgatgacgcactctagtgatagcgatgttcgataattttttccaaaatcgcttggcgttgcttttctttggctgagccgaattggttttcttccaatgaattaaaatcgttggcgagtaaaactgattctagatataacgtcaattgacgcttgatataaaccttattgtcttcattcgtttgcttgggattcccagcgataattgctgcagcaaattggtctggatcgataataattttgttgtcgttcatcctagtcgcttctttctcttttagttagtaaacgtttactatttacaccatacaaataaatcaatctgtacaagaactatcctgtaaacgcattcttttagattgcaatcttattttactaaacttttagtaaaatgtaaacggttatttaaaaacgttacctcttgttgatttacccaaaataaaaaggctactcctacgagcaacctttttatcaattcatttatttagtctgaaatttaaattttgtccacggctgaagcatttctaataaatctaattcctccggtttaattcgtcccactttatttttgcggctatcttgatgcggttcaaggacaatctgaacctcatttttataaatcccaaactgatcattacctatcacaatatcaccaatttggaacgtttcctccgaatcatgtggcgcgttaggcgttgttttataaatcacacgagattgtgttgaacgagcgactaatgcattactatcccctcttctgaagtgttgcattccaaacaatatttccctttcaaccggtgcaatatctggcatcaactctggtgtaaaagctaattgataacgattaaccgctgctaaactttgcaattccgcctcactcgcgtaagcattaccgataatgacatcatcaatcaaccccgttgcaaatagccatttagcttgagattcaattggtaaataacggtccttctcaagtgttggtaaaccatcatttacattccatggtccctgatcaccgttttgacttgcaacaaatgcggcagtgtgaataccatgctttttaaatcgctcactacatgcaagaaagaacgggactgttaacccagttcccacttgtggataaaaattatggcacccaaaaatgtatggttcgtttgcttgataacttaaaatgttatccaaataggcaacattattactcatattcaactcaataattaaatgatatggattataactaataagggcttctgtactcccatcaaatccttgatctagtcggatcccatcaacacctaattcagcaaaaaaaccgagttcctgatagctaatccctaattgatcaaaaatacgtggtgaaatatcaatcattgtttgataacccaaatctttcgcaacttggataatatgttgatattttgctttcgtttctgcaatatcaccaacctctaacatactcatgaatagacgagaaaaaccatattggcatcctaattttaaatacgcttcgtcttcttgtggaatgctgtgatcaggataaatggataaacctagttgccgaaaagtcatttgaaatcctccaggataaaattttttacaccagccgcattactgccctcaagtgttacaaattgaaccgtgctcttttgagccacttgttcctctacacggtgctttaataattgattatgcgtcaaaactgagccggttaaagcgattttgattggtttatcagttaaaaaacgctcccgcattaattgaatttgttgcgctaactgattagcacatacctcaattacacttttaaactgttcattattttgaccttgttccgctaatattcgagcttgtgcagcaatttgctgccgtgacatttgataaaaatcactaatcgcttccgttggtgatacataattcaaagccgttaggattaacgttgtcatcggtccagtttctaactgctgattcaattcttgtgtcatctgttgatagcaacgtttgacaatgtcatatgcacctccttcatcgcctaatagatgcccccagccaccaatccgatatcgtttggggccttcttgtcctaaaacaattgaacccgttcctgcaatcactaatatgccggaattgtacccaaatcctttcaacattgctaaatcagcatctgaaattattcttacaggtattgagaatcggttcagtaaatatgcttctattgctgtttggttatttgcactctgactacctgcaacgcccgctaaaatcaattggcattcatgcactttattttgattaagtaacgtttcaataactgtttctaaattaacaagagtctgttcgtagtttaataagctattacctggtccagcacttgctgttcctagtaacgtcccatcctctgcccaagcctctgcttccacatgggtgccaccactatctatcccaattcgatattgcataataagtatctcctttcagagcttgactaatttcatgaatacggatacattataaccagacggaaattttatttcaactttttatatactttgaatttatatttcagaacaaaggtggtccttactatcgcactaatgactcttaaatataacgacacgatacttgataatcaaacaacaatcacgattatgctaccggataaaattaccggaccattgcaatcgctctatgtccttcatgggctaggtgatgacggtagtgcttggcaacgaaaaacttaccttgaaacattagttgccgattatcaggtagcggttatcatcccttctcttcctcgtagttggtacattgatcaaccagatggacaagcttgtttctcatttttgacgcatagtttgcctacctacctcagccaactattaccattatctccggaatcccaagatcatttcattatgggtaattctatgggcggctttggaaccctcaaatggctcaacacatatcctgatttttttcaagctgcagtcgtcctatctcccctagttgacttgaaaatcgtaccatcgttgatgccggattatcgtcatgttttcttagatgtacctttaactaattatcaattaacaaaaccatttaagttaactcaaacacctatttattggacgattgggactgatgactttttatttcaacaaaatcaacattttctagacaaagtgtctttaaaccccgctagtaaagttgtctttagcccaggtcgacatgactggctattttggaaccaagcactaaaccaagcactcgcttggttacccttaaaaaaataatggagtgattataatgtattcaacaaccgaacaacgtaatccagaaacacttaaaatagatcagctcgatacacttgatgtcttgagcctaattaatcaacaagatcaaagtgtgccctacgcaatcaatcagcctgaattattggaacaaatgagtaagattgttgtagaaatgaccactacctttaaaaatggtgggcgcattttttatatcggtgctggtactagtggccgtttaggtgttctagatgctgttgaaattgtaccaacttatggcgtttcacctgatcgtttcgtcccacttatggctggtggtcaacaagcaatgtacgaagctgttgaaggtgcagaagacaatgctgatttagctgtccaggatcttaaaaaccagcatttccaacctggtgacttcttaattggtatcgctgctagtggacgaaccccctacgtcattggtggtttagattacgcccattctttaggtgttaaaacagcttcaattacttgcaataaagatgcactcattagccagcatgccgatttaccacttgaaattatcgttggtccagaagtcgttaccggttctactcgaatgaaagcaggaactgctcaaaagctagtgctcaatatgctttcaacaaccacaatgattaaatgtgggaaagtttacggcaatctcatggtagacttaaaaccaacaaatcaaaaattaaaaatccgtgcaaagtcaattattcaagaagcaacaggtacaacagttgctgttgcagaaaaagcatacttcgaagcacacgaatctgcaaaagttgcaattgtgatgctgagcgcaactgttgattatcaatcagcagttactgctttaataaacaatgatgaccgcgtagcactcgctatcgctgcactcttaaagaaatgagagacaactatgcctattattgccaaaatcaagaaacattacagccttttctcaagtgctgaaaaaaaagtcgctagctatatcatgaatcaaccggattccgttctacagatgactgtgcagcaattagcttcagaatctgaaactagcgctgccaccgtcattcgactcggaaaaaaaattaatgtggatggttttacaccccttaaaattgaattagctgctgacttaacacaaaccacaaatacttttcatccagatattacaaaaggcgaacaagttaattcaattaaagacaagctcctttataatgctcaaacctcattgaatgaaacagttcttcaactcgatgaccagcaattacaaatgattagtagaaaattatcaaaggttagaaatttaatcgttttcgggattggcgcctcctacttaactgcactaaacattgctcaaaaatggggacgaatcgggattgccgtcacaccatttaatgatttggatggtttacttcccttattagtaaacgccaatcagaatgatttaatttggatcatttctaactctggtgagtcatcagatgccattcaagttggaaaaattgctaatcaagttggcgtccccattctatctcttactcaatcagggaataatagtgtttctaaattaagtacgatagctgttcacacaagtcaaccaattgagtttccagatcgaattgccgcgaccaattccctacttgtgcagtttactgttgttgatattattttttatgaatatgtcagccataactacgatcaaagtattgaacgactcggtaaatcagcagaaattatcaaaacaacacaaaagaaatctctgaaataatatttcattatctttttttaattttatatattgaaatattatttctatgtgctaatataatggtaagcgctttaaataaaatcttggaggtttaaccatggaaaaatttatgaaatgggttgaggaaaaactcgtcccgcctatggctaaagtcggtacacaacgacatttattagccattagaaatggggttgtctcaactttatcactaatcttaattggtagtttcttcttaatttttgttaacattccgtataaaccattagccgatttactaacaccctacgctgctacaattgctctaccatttagaatgacgatggggttaatggcaatctacgcaacctttgtaatgggatctgacttggcaaaatcatataagttagactcaactactggtgggattttatcccttggtgcgttcttcatgctacaaatgcccgttaacgttcttacacctaaagacaaaccactcggcttcgttttaccaatggggagcttgggtgctagtggaatgtttactgggattttagcaatgatttttgctgtagaagtttatcgcttcttctccgttcataaaattacaatcaagatgcctgaacaagttccacctgctgttgcacgttctttcgaagcacttattcctggcgcaactatcttagtgacattatggattattcgcgacattgcaggctttgatgtaaataatgctttactcgcattattcaaaccaatcaccggcgtacttggtaacaacttgtttggtgctttactcccaatgctcttaattcatattctatggtcatttgggattcacggaatgagtattgttggttccgttgttcgcccaatgtggctcatcatgctcgacgataatgcaaaagcattggcaacgggtacatcagcaacgcatcttccttacgtgacacccgaacaattctaccaatggactgttacaattggtggtgctggcgctacaatcgttgtagctgcactcttcatcacaatttgcaaatcaaaattcctgcgtgaagttggacgattctcaatcattcctggaattttcaatattaacgaaccaatgattttcggggcacccatgattcttaacccatacctcttcatcccattcaatgttgtaccacttgttttaacaaccgtttcatacaccgcaattaaattacatcttgtgaatggcttttcaacattccaagcttggacattacccgcaccaatcggtggtttccttagtgctgggaatgactggcggattgttgttttaattgccgttaaccttgtcattgcaactatcatttactacccattcatcaaggcgtatgataaaaaaatggttgcagatgaatctaaagcagcggcagaagctgcataaaaggagaactcagcatgctctattggattttaatatttttaggttttctaatactcttaattggttgccaatacctattaaaatttttaaatcagcacggaattttaattaaccgttggatttggggcttgctctcctttttaattttaattgtcccacatgttatttggtcacatattccaactggaattgatggtattctatacgctttatgtgctgtttttgccattaatttcatgattgaacaacatgcttatgttcagcaattaaatcaataattatagaaaagccccgctcatctgagcggggcttttctataattatttggctaagactgtcatttgattattataacgtgcttgattatcaaactgcatcaatactttagtcgctagattttgcgttgcaaaaactaatctttcaactggcgtatttgccacgttgtaagccatcatgtgtgaaaaataaacaaactgtaacatattactgtatgccgaaacatcgccttgtttcacaatttttttaacgaaaaaattaacgatatgatcgccaaaacgaacataacctggaatcgaaatcagttgtacgttggactgtttagcagcccacacacgattggccgcattatctggcgcgtaaatgaccgttgtccctgtcgtttggtctgttggttgcattgtaattaaagctgtttttgacattaatagatactcctcttaagtgatgataaggtccattaccatttggagttggtagcccaaatggtgggcaactttaatcgttgtatcgacgcagtatttggtctgggcaccacaaatttcaagcgatttgatttgcatttggctcaataacgtttgtaagtttgtctgccaaaatgaatccgcatgcgttttttgaacaaagattgccgttttaggcacattcaattctggcattatctaccaagtcgactgaccagcaatcaaagtcttatcgttatgttggacaaaaataatcgggcgactttccgcctgataggcatcaattctggcattaacgcctttaattaattgattaagacgcgcaacaggctgctcacttttgcagacaccattttggagatcaatcactaataaacaatcggctaacttcagcattagtcccctctttcctttaaatcaaatcgagtatatcattatttaactaaacctcatattttgtctgacgatattaaaaggaagagatgcggattacccccacctcttctttttcaatgtctccgatgtttttcccgcttcttaatctggtgttgctgaaaacggctgtattgtatggccttcttttcggcatgttgttcagccctattagttgcatgttgtgctttacgttgacgactcatccgaatctttttgttgataccaacgaattgaataccaatgataactgacttggcaccctcaaccacttgcatttaaacaattccttcacatgattatcgctcaatcccccactttcccgccaaaagcgttatactatggataataaataaaaggagtgttttgacatgcaaaaaccaattaaagggtcatgtaccacggtcttagtcggcaaaaaagcttccatcgacggttcaaccatgatttctagaaatgatgatggccacgaagctttggatccacaacgctttgttgtggtcaatcctgaagaccaaccccggaattatcaagcggtgattagcggcgttcaaatccaattgcctgataacccaatgcgctatacctcaattcctaactcattattgacgaacgggatttggccagctgctgggattaacagtgaaaacatcacgatgtctgccacagaaacgattaccactaacccccggattcaagggcttgatccttttgtccctggtggcatcggtgaagaagatattgtgacattagtcttgccttacatccacagtgctcaagaaggggtcgaacgtttaggcgccctccttgaagaattcggcacatacgaaccaaacgggattgccttttctgacaaagacagtgtttggtggcttgaaacaatcggtggtcatcactgggctgctgttcgcatccctgatgatgcatacgtggttgcccctaaccggatgaacatcaatcatttcgactttgattcagccgacacgctttgctcagctgatttaaaagctttaattgatgataaccacttaaatcctgactttgaaggctacaatctccgtcatattttcggcagtgcttcaatcaaagatacggtttataacaacccacgaacatggtacggtcaacaatacttcaatccagaaatcaaacaagatccaatggaccaagatttaccattcatctgccatgccaaccgcaagatttcaatcgaagacgtcaagttcgtcttgagcgctcactttgaaaatacagaatacgatccttacggtagcgcccctgaagatgttaaaactcgtttccggccaatcggaattaaccggaatcacaacatgcatattttacaagtgcgcaacaacgtgcctgctgaaattgccggtattcaatggttagcttatggtgccaatacatttaacaccgtcgtgccattctacacgaatatcaacgacacaccagaatcatacaagaatgccacaggtatttttgacttgaacaacatgtactggttaagctgtacaaccgccttacttggcgatacagattacgacttctacgttgatatgcgtaacaccttcgaactcgaagcaatgagtgcctatcacgtgatccaaaacgaaaccgacaaggccttcactgatcaaaaagacgctgcagccttcttggaagccgctaataacaaattagccagcgaatcacttaaacgccaaacagccctacttggccaaatggtgatttcaggctcagaacacatgaaattacgctataacttgaacgactaataattatttaattcaaaaaagagcggtctcagctattcgttagttgaaacgctcttttttgagttgtcctcttttttcagtagcgtataataaatactattactcaaaccacactaaggagtcatttatcttttgaaaccccaaaaattaaaactatcggattacttactcggctttggattcgtattattgatggtgggcattgccactgtcttgaacgatgttgagattattctacccgaaatcgcagccttaacaacggggctgtggatttatcacgaaccgggttggctcaatcaacccgccaagatattttggctgccatcgataaccgccatcgttgggtttggcattaatcggttgccgctcagttatgcagttaaaattagcttactactactcatcatgattgttttactttgtttatttcgctcaacactcgcaccatcgtttgcaacggggctgttaccgattatcgtcaacgccactgaactttcattcatcattgcaattttaggctttacgctcactttgatgttggtcgttagcctccgcaaattgcatctgcaacatccctatcatgccacgattaactatcgcgtcatgctggtttttctaatcattgcactcttatgggtgttagttgttagtttactcggccggccacagatggctgccattccgccggtacttgtcgtcttttttgaaattctacaaaaaccaatgtatccaggtaaaatggccatcaagcagatggttgcattaactggcgccgccacaatcggattcgtcgcttatagcttacttgattcacggttattggtaaccttaattgcactgccactagtttgggcattactctatctgctacaagtcagaattcccgccgcctgcgccttccctttattggccattattctcccacaccaaatgtttcaaagtttgccgctcgtcactttactggcaactagttacttttttggggctgcttatttataccagcaatacattaagccgcgtctcatcagcagataacatgacggtttacgactaattttattagttgtaaaccgttttttagtggctttttgcacaagcaataatattgcagtttcgctgagaaataatatagttgagttgaccctgtcttatctctctgggcacaaagtgcaatgaaagaggctatttacatgacaaacaaactaacgactaatgagggccaaacgtgggcggataatcaacattcgcaaactgctggtcaacgcggtcccgttttaattcaggattattaattgctcgaaaaactcgcgcattttaatcgtgaacggattccagaacgggtcgtgcatgctaaaggcgccggtgctaaaggttacttccaactcactaaggatatgagcgcctacacaaaggcagccattttcagtggtgctggtaagaaaacaccaatgattgcgcgcttctcacaagtagctggtgaagccggctatcccgatacttatcgtgatgtgcgtggatttgcccttaagttctataccgaagaaggcaactatgacattgttggtaataatacgcccgttttctttgttaatgatcctctgaaattccctgatttcattcactcccaaaaacgagatccacgaacacacgcgagaagccaagacatgcagtgggatttctggtcactttcacctgaatcagtccatcaggtgacgattttaatgagtgatcgcgggattcccgctagctatcggatgatgcatggctacggtagtcatacctttaaatgagtgaatgctactggtgagcagttctgggtaaaataccacttcaagacaaaccaaggcgtccataacttaagtaacgaactggctgccgaattggctggtaaagatacagattatctacaaaatgatttattcgatgcgattgaaacaggcgaccatccaagttggaccgttgccgttcaacttgttccttatgaagctggtttaaactatccgcaagatatctttgatgtgacgaaggtcatttcacaaaaggattaccccttaatcgaaatcggtcaaatggtactcgatgaaaatccaaccaacaactttgaggatatcgaagaattggctttctcacctgctaacttagttcctgggattgaagcttcccctgacaaactcctccagggacggttgttcggttataaagatgctgaacgttaccgtctaggtgccaactatgaacaattacctgttaaccggccaaaagtgcccgtgcataattacgaacgcgacgggatcatggcaaaaaaccaagagacaggcgtcaactatgaacctaatagtgaagatggtccaaaagaagtcccatctgccaaaattcatggcgaccaacttagcggtcaaaccggtaactatccagccgatcccgattactattcagcagccgataagctttacaacttactaactgatgaagaacaagatcgactaatcgaaaacattcgcttaaatctcggccaagttacaaaacctgaaattcaaatccgcgaagtcaaacagttctaccaagcggatccagaatacggtcgccgagtcgcaacggcattaaatttagatttaaaccaatttgaacactaatctatacaaaaagaaggtatccggcccaccggataccttctttttatttatcttcttttggagaatcttgttttgctgcccattctttcttggtcatcaagtcagagacattcattttaatcttcgtcacgtttaaaccagtcatttgatgtactgatttagcgatgcgttcaattgtttgttcgaagatgtctggcgctgatttaccgtattccaagatggcatccaattcaatcgttacttcttggttatcaatatcagcgtcgacgccctttgtcggatcttcttggtctctgaaacgatcagctaattgactcatcatcccgcctgataattctaagacgccatcgatgtcatgcaccgtttggcccgcaattttttcaatcacaccatccgagaagttcaattctttttcgattttttcggtatgttgattcattgtcttatccatcattttatccattggtttgtttggtttatccatcgttttcatcatcctttactatttttattgaacgcgcttttcagaatcacttttctttggattactgccttgttgttgccattctttcttagtcataatgtcactgacatggctgttaacttcgacaacactcaaaccggtcattgattcgacagcttcagtcactgcagctgttaatcgttcgaaaacatcccgtgcattccggccgtattccaaaataatggtcatgtcgattgcgacctgtttttcgccaacttccacactgatgcccttcgttggatcactatcgtttctaaaacgatccgcaatatcactgaagaaattaccgttcatcgataataagccatcaatgttttgcgctgtcttaccagcaattttggcgattacagcatcttcaaaagtcaatttgctattggccatcacttcatctaaatgtgcttgttctaccattttgtcacacctccgttatttatcctgcttcaagacccggttaacttgtgatctaaatccttctagatcttccttagaccctgttaaactggctgcaatgtagccgagtaaaccagcgatgataatcaagattaaactcataaatccaaaactaatccaaatggctgccaacactgccccaacaacaaagccccaataagaacgtctcatttgtctcacctcacatcactttttgcctgattacttagcggtgatagtttgacattcactgctttaatcggcatctcaaagattgtttgtaatgcttgctgtaccgtttctttaactgcccgtgcttgttgatcgagatcgttgcgatccactgcgaccgcttgaacgtcggcagtcacttttggatgtcggcctttaaacgtcgtatggactaacacttccttaacacggtgtttttcaataatagcttgtgtcactgttttttcaaccgctttgcgggaaagtgctagttcacctttatcggtcttgatgatcatttggcgttttttcggtggactgaataatgccaatagcagtaaatataagaaaattaagccgctaagcacccctaatccaagtccaaaattaccgacccattgttcgggtagccaactaagatgcataaattgcttattggattgttgtagtggatagattaatgtgataaaccacgctacctgacacaacccaagcaaactggctaaactgatcaccactttagttaatttattcatggtgtccgcccctttgtattaggattttctacgtgtgaataataatgaaacaacgaaaacgacaatcacggcaccgataatggatggaattaaggccatcccggcaagctgtggtccccagctgccaaacaatgattgacctagccaggcgccgactaacccaccgacgatattgccgatccaacctgcaggtaaatcacgacttgttaatgcccccgcaatcaccccaattaaagcgccaataattaaaacccataaccaatgtaacataacaatcatcctttcttgtttccttaaaatatattgctggttctccataaatgtaacaaattcaaccagcatccgtaaaacaatacgcttatcaatattattaaattatcgtaaatgcacttgtttaattaattgattcgccaccggtaacgccgtaaatttgaccggtaatatagcttgctgcgttgcttgctaaaaaaacatatagcggtgctaattccgccggttggccggctctttctagcaatgtattctgcccaaacttaggcaaagccccttccagttgtccttgagccaactgcaacggtgtccaaatcggacctggtgcaaccccgttgacccgaatacctttatccgctaattgttgcgctagattgatcgtaaaattcttgattgctgcttttgttgctgcataatctaacaaatgcggactcggattaaaggcttgcactgaagtggtcgtcagaatactgccgccagccggtaattgagacaatgctgcttgcacaagcgcatacatcgcaaccacattaacgttaaaactatcttgaacttgttctattggtaattcggtaattgatggatgcgcaatttgttgagctgcgtttaagactaatgtgtcaagtgtgccaatttgctgctgcgcggtttccactacttggctagcaatctgtggtttccgaaaatcagctgggatcaatgcgattttacgccctgcatctcgcaccaattgagccacttcttgcgcatccacttcttcacctggcaaatattgcaatgcaatgtctgctccttctcgggcaaacgcaattgcaactgcgcgaccgataccagaatctcctccggtaatcagcactttacgatctagtaaccgttgtgcaccacggtagtgttcttcgccacaatctggcttgggatgcatttgatcttgcaatgccggactagcttgttcttgttcttgaaatggctctgtccgataaagtgttcgcggatcttttaaatctggtttacccatcttcttgttccctcttttccaattaatctagatacactgcttttaaatgttcaatgtcctgcgttgttaatcctaaggcctgttgtaaataggcttgagttgaaccataatcctcattgattatgcgctcagctgcgtttaagtaggactgatcaacactcatcaatgcatgcatactttttaaaaagccgcttgaggcatctttttgacgtagcgtcttaatgcgggctgcaacctgttccctagatgctgtattcgataatagataatcatattggatcacatcttcaggtaccccgagtgcatttaataaataataagccgccattccggtacggtctttgccacctgtacagtgaaataaaactgcttgttgcggatcggcttcagtcaataatcgttcgaagaattggcgatacattccgattgaatagggatcttgcaccatttctcgatagacttggcgcatttgttgctgcccaccaagcggattattggtgtagcgctcataaagttccgcttcactcgccgtactttgcgtcgcatcttctttaaaaattggcaacgattcgtaagatgccgtcgtaatctttttatctggcgcttttttgcgctccattggtgaacgaaaatccacgacataggtgatatggtagctctccaagagcaccaattctctcttactaagattcgccagattccccgttctgaataatcgatgcggtttaatcgagcgaccatccagtgtttgatagccacctagttctctgaaattgtagccatttttaattggtaatatgcgcgaaaccatcgactcatcctctctaatcaaccactttggctgctaggatcattgattatcatccaatttttgaagacacatttttaccgtcttgttactaaaaacacgaccacgatgatcaaattccaatggcccccagctctcaccgacgagggcctcaccgttattctctcttaaaattgcttcctccaaatcagtcataccttctagaaaacactttagattggctgattctttcttaatcaccaagcacaattctggggtcttgactgtactacgacctaacctaactttcctaattcggacttctttttgcataagcaaccttcctttcatgaaatctttaataacgctacaccatcaatataaaacaatcacatttattgatgcaacttttatgattacgttttgttattgttagcataatcatttacctttacaaagattgttgaagttgtttaaataaagacacaacacctaaaaggagatggttattatcaacgctattaatatcatgtttgccgcagatgaaaactatggtgatcaacttttaatcgccgtaaagtcggctctaacccatatttcgcccaaaactactattaatttttttattctcgataatgaactcactccgcaaacgaaacacgctgtttccaagcgcgttccacgccccaatcaagttgagtttattgcacttaataagcagctttttgaaaactgtcctgaaagcaaccatatcaacaaaacggcttactaccgcattttagcgccaactcttttgttgcgaaaaaaaatcgaacgtgtcttatatttagatgtcgatatcctcgtacaaactgatctcacgccgctatacaatacgcctttgggcacaaatatcgtgggtgccgtgattgatcctggacaagcactcacactgcgacggctcggcatcaccccaccacaatcgaataacatctacttcaattcaggggtcatgctaattgatacggttcggtggaatcatgcatccatcacagagcggactttccacttcatcaatcatcatgcggatcgcttacaattccatgatcaagatgcgctaaatgccactttggttggtaaagtgaaactactccatcctaaatggaacgtacaaaactcattgctctttagaaaacatgcgcctatcaacactgaatatgcccatttatttgatgaagcaatcgccaacccggcaattgttcacttcacaacacacgagaaaccttggaacactctaaaaagtcaccccttcttaaaccaatatcaaaaggaactcaaacaattacatgcgcaacaatccgatataatcaatattgtatcggctgtcaattccgatttcatcgaaacgctggcaattctatacgcctcaattcttaatcacaatgactcacatcgacactatgctttttacgtcttagaagaccacctcaccgcacgagataaagcagtcttacagcatgttgtggctcgatttgatgccgacttgacctttgcagaggtcaacgaatctttactggccaatactgttgaaagtgatcggatcttgaaaacggcgtactatcggattctaattcccgacgtgttccctcacctcgatcgtgcactctacatcgattgcgatgcgctatgcctcacagatttagcccggctatgggatatcgacttaggccaatccttcctcgctgcagtagaagatgctgggttccacgaacgcttagaaaaaatggctatcgattaccaaagtccgcgttactttaactccggtgtgatgttactcaatctcaaaaaatggcgtcaacacaatattgtcagccgtgtactcgacttcatcaatcagcaccctgagaaattacgcttccacgatcaagatgctttaaatgcaattttgcatgatcggtggattcaccttcaccctatgtggaatgcccaaacaaacattttgatgaacaccattacaccaccaactgaacacctcaaaaaacaattcttagaaacccaaaaagaacctgcgcttgttcacttctgtggtcacgaaaagccatggcacgcctcatcttcccatccattcacgccacaatatcgttactaccggcaacggttcttaaaacaaaaaaagcggctcgttcccttcgccaatcgccgttccctttctcaacaaggataactacaaaaaaagcgggtgcttagacaaatttatttttgtctgagcacccgcttttttaattgctaaaaattatctttttattgaccgactaagccatcatgaatcttatctaggttccacttcatcatcgtatagtaagtgtcaccttgcttccctctttgcgcgagtgagtccgtaaaaattttcgcataaattggtaacccagtttcctgagcaactttttccattgatttcggcgaaacagaactctcaacaaacagatgcttaacatctgaatctgcaatttttgcgagaaccgtcttcatctgttcaggtgtgccttgcgactcagtattaatttcccaaatgtaaaccggtgtgacctgataggccttaccaaaatacttaaaggcgccttctgaagtcaccaagacccgctgattagctggaatatcggcgaatttagtttgcgcatcagtatgcaatttgcgcaaacgtgcagtatagcgatctgcatttttgcggtaatcatcagcgtgcgctggatctttggtctgcagcgctttcgtaatattctcaacgtattgaataccgttcgccaaatccaaccatgcgtgtggatcgggttctgtttggttggttgtcaaatgttgcacctgaatccccttgctagcagcgaaaacatccttttcgaattgcttatgcgcgatcttaacaagttttctaaaccaaccattgccacccgtttcgagatttaacccgttgtgaaaaatcacatccgcatcagtcgcttttgaaatatccgtcggttgcggttcatattcatgcgggtcagttccccgtttcacaatactgtaaagttcaatgtggtcttgaccaacattatggaccatatcttcaagaatcgaattcgtggtcactacacgtaatttagtctgctggttcgtttgttgttgtttagattgggcgcggtgctggatgaagccatacacaccacccaccaaaccaaaaactgcgattaacgtcacaatcatttttttcatgctggtcgtcctcctttgcgccacttaaggaaaccttgcttaggtgcgcagatgaatgaaatggcaaagagcacagctgccatcaaaacaatcgccggaccagatgcccagttcaatgtgtaactgaagtataatccactgattgctgacacagcaccaatcccagccgataagaagagcatcgtcactaagcgatccgtccataaaaaggcggtggctgctggggtaatcaacatcgcaacgaccaaaataatcccgaccgtttgtagggctgaaaccgtgactaaggttagcaccaacattaaaccgtaatgtagcacctgcgtttttaacccatatgttttcgcataggtttcatcaaacgaggtaatcaataattctttgtagaagaatgagacgaataagatcactaagcctaagacaatcgccgtactcataatgtcgctatcactgacggcgagaatgttcccgaataaaatatgatgtaagttggttgcactttcggccatcgaaatcaggataaacccaagcgcataaaaggcactaaagacgaccccaatcgaagtatccgtcttaattttactatgtgttgcgacaaagccgattaagactgccgctaaaataccaaatacagatgcgccaaccagcacattaattcccaacatgtacgccactgcgacacccggtaacaccgcatgtgaaatcgcgtcacccatcaacgacatcccgcgcaaaatgatgaaactcccgacaatgccagacatgatgccgaccattacggcggtcagcaacgcactctgcaagaattcataacgacccaacgcactaataaaagctggaatactcgtcattttgccacctcctgtgcatcaaacaagacagcggataagtccgcactaaaagcacgctcaatgttttgcgcattataaactttttcagttggtccataatcgacgatgccgtggttcatcaccactaaatcatcgaaatattgcgatactttattcaaatcgtgatgaatgacaatgattgttttacccgcatcacgccactgtttcatgattgccatgatcgcggtctcactctgtaaatcaatcccaacaaacggttcatctaaaataataatatccgcttcttggacgatggcgcgtgcaacgaaaactcgctgtaattgtccacctgacaactggccaatttggcgttgcgcaaattcgctgagcgatacttgttcaagtgccgcgcgactggcttgttttgcctttttacccggatcgcggaataagcctaacttgccatacgtgcccgttagtaccacgtcaaaaacgttaattggaaaatttaaatccaaatctttacgctgttcaacgtatgcgacttgcttctggactgcgcgcattggtcgatcttgatataaaactgagccttgccgtgccttaaccaaccctaatattgctttaatcagagttgatttgcctgcaccgtttggtccaatgatgccagtgattttgcctgcgtcaaactgaacggcaacatcagtaaatactggtgtgtcatcgtaagcaacggtgaggttcttaactgataacataaagagcctccattcttttaggtaaacctaacttttctcactacagcatacatgattttaatggaattaacaaatattttagtttaggctaacttttcgggatttctgtggaacaatggcttaggatgtttcacgtaaaacataataaaagagtcgcgctatttttaaacagcacgactcttgttattaattagaaatcttcgtcagcatcctcatttgaaacagtgtattgataaatccccttttgaccagatgctaatactttatctgttaatgcatccaatcccaagttgtcacggttgatgaataattcaagtaacatcggtaaattaacacctgatacgagtcgatactgtggcgcatcccgaatgatatcaaccatcacattaaaaggtgtcccacctttaatatcagtcaatacaaaaatttcagatagtggttcaaatgatgcaaaacttttattaatttgttggcgtaaagcttctgtcgtttcccccatttcataagaaacaactgctaaatgcacttgttgcccacaaatcatttcagcagcttgaactagacctctaccagcggcaccatgcgtacaaatcacaactccaatcatctctgttcctccagccattttaatatttcaattgacgatagtaacgtctaatttccattggatggcggttcaagtcttcgatgtgcacatcaattcgatcattgaccgcatgcaagataaatggtgataatgcaccgcggaattctggtgaaatccccggcatgtcgtaatctttcgcatcgataaccgtataattagcacagatttgtgggatgaagttagcaacgcgttcgctcaattgtcgttgactatcttctgtcacgtaaattgtgactggtgtatcgcgttcaacaatttcgaacatcccgtggaagaattcttgcgcttcaattgattttgttctgagccaatgttgttcttcccaatagcacattgcatatgaatacgtagcaccccattggttaccagccccaacaaaataatgcatttcatcttcgtgatgtttcagtgcaaattctgtagcaaattcgtccgcatttttataaacagccacaacatcttttgcaaagttatcatccatttgtttgtagaattcgtcgtattgatcgaattcccctgctaaatacataaagcgatcacctaccatgaagaacttaagttgttcattcaatgggtatgaaattaaataatcacacatcgttgctaaatcggcatctgcacgatcaacaaacccaattacacgtgcaccaatttcattacatttcttgacagcttcgaccatttcttgcgtatttccagtaactgaagagataatcacaaccgtgtcttttgtcactcggagattgccagttgttaagaacgaagctgcgttttcgtagaatgtttcaatttttgttctttctttcatgtgaacgaccgcttgcatggatgatgcataagtgccaccgatcccaatccaacaaatattactataaccctcatcattaatttgatcgacaattttattaatgtctgatctgagtgcaattccgccttctaagtttgccaataattctttttcgttaaatttcaacatctcaatttccttctttcaattttttatatttttgaatttgtaattgggtcaaaatctggaaaagctgacacttttagattaatttgcttgcgcgctgatgcggtataagccaataagtgaattggaatagtcataaagagtggggctaacaactcatcagttggtaacgctaagccgaggtcgtcttgacgatcaacttggccattcgtaattcggacaaccttcgccactttgccggttaaaaattgttgtaacttagcgactcgctcttgtaacttcccgtttggttcaatgaaaatcacatgatcacttgcgtggagtccaatataagggccgtgcatatactcttcaacttccttaccgagtgcggtaatacgcactgtttctgtaatcttagtttcaccttcacgggccacaccgtatgtgccaccataaccaacaaagattacgcgttgtactgtatcaaacacatcgctataatgcgctacccattctttagcagcatcaatgatgcgtggtaggtcagtcacaatgttttcaatcgctgccaaattcgtttgataactcgcttgatcctgtttacccaattcaagcgccaacaacattaatgtcaaaatcgtggcactatagccagcggtcacatagggcatctcttcaattggcatccctagtggaatcacatgctgacttagcttggcaatcggactgttttcatcaccagtgatggtataaatccggccgttgattgcttgaacccgtttgaccatctcaatcgttgagtagctatgcccaccctgggaaatggcgatatacaacgtatccggttgcaggtgcaacatatagttcgccgtaaaagatggctcctcgacaaaaacaggaatgcccaattgctggctcatataaggctgtgccgcaaacgccgcatttgaactcgatccagttgcaaaaatcacaacatttttatatgccgttgatttgtcattcagtaacgtacgcaatatcgtttgccgattggctaatatatcagcatagattttcggttctgcttcaatgtaatgcaacatatcctgcatgcttgctgcctcctacttcagtagacctgtgtaagcaccaaagattccaattactgcaattaataatagaatccagtgtgctttcaagccttttttatctaaccagaaaataaagagcgtaaagagtaatggcaagatgcctggtacaatcccatcaaaaatactttgaacagtcggcgcacctttacccgcaccaatcgtcaatggcatcttcagcgtcaccattgtcgccaccatcgatccaacaacgcccagccctaagacggaagcgccaaaggagagtttatccattaaacccgttttttgaactttttcgatgaagcccgcaccgatattgtagccaatgaataacccgtaataccgtgctaaaacagccggaatattgaagattaacaggaataacagcggccctagcagattcccttgaagcgctaaggaagtcccaattcctgtcgcaattacccgcaacgtcccccagaagaaggaatcccctaagccacttagcggacccattaacgcaatcttgatattgttaattgcatctgtgtcaaaattttcatctaatgccgcttgttcttccattgctaccgaaatccctaatggaaatgtagaaagccacggcgttacattataaaattccaaatgtcgtttataggcgctcgttaatttttctttactgcctttatagattttatttaacgctggtgtcattgcaaacgagtagcctaaatttgattgtcgttcataattccaggcccattccatcgtgaaggagcgccagaaaaccttcatcaaatcttttttcgagattaaactagaattcttcatcttcataatcgatgcctccattcgttgtacttgcagcaactgtctcgcctttatgtccattattgaaagctgagtagccagttaataccaatgcaagacaagccccaaagatggcaaccccagtaacagggactttcatataaaccgctaaggcaaatcctaatacaaagtaaattgcattgtgtttattgaccattaatttcaacaataacgcaaacccataagctggtaataagccggtcgcaattcctaaaccatcgatgacaaattttggaataaccgctaataatgacttaattactggactcccaacgatgaaagaaattgcaacgattaagccgattggtaaattgattgagaagaacccaccgaacaattgcatccgatccatgccctttgaattaccctcggccgcgtatttatctgccttatgaacaaagtatggcagaacaaagatgaagcacagattcttaataactagcactaacgatgcaatcggaatgcccaatgttaacgcaacggctgtactcttaccggcaccaatggcaaaggccgttcctaaaatactacctgaaataatttctggtggaatcgaagccccgattgaaaatgaccccacaaaggccagttctaaggttgcccccatgataattccggttttcatatcacccataattaatccagcaatggtacacgtcacaagtggtcgcgataacattgatgatccaaataaatattcagcattcgccaacatcgctgttaacgctaataatatggcaatcaatatatggttcatgagtttatcctccttttattctggtagtatcattttcttttcattcggtacttgttggataaagacgtctacaccagatttagaaagcgcttttaattgatcgacttctaaatcggttaagttaaccgccttagaataattcttcgttccttctcgttgttttgtgcccccaacgtttaacaatgtaatcttatcgcccgttcctttgattaatttctccgcatccgctactgattcaacaacaattaacaacttatatttatcggttgcgccagaattaatagcactaatactgtcatcaattgatttcatcactaacttcgcttgttctggcttcgccaagcgaattgctgatttacgaaagtcatcccccgccacactatcattagccactaaaatcgtattaacatctaattcgttaaaccaagaaactgcaacctgtccatgtaataaacggtgatcaattcttaaaaattctatcatgtgaagtcccccttaattaaaatcaatattaaattctgttgtatcagctggttcatagcgattcgaaatcccaatcactttatgattttcagcgtaatactgactgctcaatttaaagagcaacgcatcttcttctagatctaaatatttagcatgcgttgatgccatgctgacgagctgtaaatcttgctgcattccgtagaaattttccttagccgaattgacaagttcgatagtattgaccatctggatatccgcaagactcaaagtcggatataactgctgcggtaaaataatcgtttcgtaaacctgattctttttttcttgataaacatgtttgatggtatacaacaacgcgttgtcactgatatcaaataattccccataatatttatccgctttgcgaagatgaaattctttaatctgttttgctgcgttgcctaagttattattcttcatcacccccgtcatttctaaaatattttgcgaggaaatctggggtttaacgtatacccctacaccgtttttcttgataattagttctttagcaactaaattatctaaggctttccgaattgttgtccgacttgcaccaaataattgctgtaattcagcttcacttggcataaacatcccacttttaaactcgctacgctgaatgcgagtttcgatttcgtctgaaatggtttcaaataagtattgtttcatcacaaatcaccatcctcacgataatcaaaaatatttttcgcatctaatcagtaacgaatttgattcccaatcagatactggacactatattcaaccggctcatcatcatgatcgtaagccaagcttgttacaatatataatggtgtcttctctggtatttctaatatgatagcctgtttcttatcggcatatcctgctttaatcgtttcatgcccgtagcctaagaccaccccatattgatccttcagtgtttgataaagggaccgattctgaaaagagatctgctcaatttctggaaagcgttcttgacttaaaaaagctaattcgtacgaaatgggtttcccattaatcattcgtttccgcggtagttcaaatacatgatctgccttcaaaaatcgaacaacatcttcttcgactggttcttcggtttgtaagacctcggtttgaatttcgtctggatttaactccgttgacattgaactcattgccagcatgttaatcacatgcttattgttaactgtcattcccacacgtggctttttttcaattagtccttcattttggaggactgataacgagcgccgcattgctgttcgactgataccatatcgctcagccaattctctttccgaaagattagcgaaggctcctttttggatatcgtatcgcaatcgttcctcacccaatgttgcaggtgagatttctttatattccaaagcgatccttcctttctcactttctaaattaactgcaatttgctacttaaaagagttgcaactagaccttgctgaattagacgccaatattcagctaacaacagtcaataaccgctatgaactcgattatcctgaaggaatgtcttctaacgcgattctttttgaacttcggttcgcttacattattcgaacaaccagctttcaagtgatggacgcgctttttaaacatcattacaattcggttcaaaccttggcagaagcaacaaatttttcgacctcatcagtgcaaaattgtattaaacaattacgcgtctatttcaacaccttctacgtcaccatttcatttagaggtaagcaaaacatcgttggcgatccgttaaacattcgcttgttgatgatttatacttatacatctatttatcgcggtagtgtgactcaggacttcgtgacgacacgttcccagtatccaaccgcgcttaaaccacatttaagtttttcgcagcatcatcagattgaagcactggaatcggtcacttattttgatctcattcaaaagaagtattcgatcaccttaaaccctgaacttcaccaactatttgaagcaattaacaagactaatacgattacccttgaattaccaggcttacctgaacagactttgcttgatgaatcactgctgtttagctttttattgcgcattgccgttgctaattacgatacagacaccgaaaaaatcaaaattactgaggctattttggcattaaggtagattgtaaaattaatccgaacgctgttcggattaattttacaatctaccattatatataatttatcccaaccgtagactattgaaaaatgttataataatcctcattgtgtatcttatacgatacaaaaagaacgcatgtttgcctttttttagtgaacctgctattattaatataatagatcggagggattctacatggttttaaaagtaatcgaaaccttttctggaattggagcccaagccaaagctctggaaagaataaaagccagaattcctgattataaatatgacatagttgcaacagtagaatgggaaatcggtgccatttatgcctatgacattattcataacggacaacaggacctgtctatttatgataatttaacaaaggatgatctggtggatcgtcttagcctatataatttaagttcagatgggaaaaatccaatctctgataacttggatggtcgtaaatacactctaaagcgtatgaatctagagaagctcaaaggaatttatcatagtattgtaaacaacaataatctcgttgatatttcgtccgtccacgcagatgaccttcccgaagcagacatgttaacttattcgtttccatgccaagatctttccattagttcttattggcataaaaatttttctggtatcgatcgcgatgccaataatagatcaggtttgttatgggaaattgaacgtattctgaaagaatacaataatcaaggccttaaaaaaccaagatttctactaatggaaaatgtgactgctatcaagagtcctagaaatgttgataattttaatatgtggaaaaaagaattagaaaaactaggctataaaagttatgccgatcttgatctaaatgccaagaattttggaatcccccaaaatagagttagaacctatatgcttagtgttcttattgaagatcaaccagaatcttggactaaaattcaaaaatttttagataatcgccaaaataagcttcatcaatttaaagatgatcctgatatttcaaaatttcttcgtctagattataatagccgtcccgagtacttacgagaagctcttgatagtacaccaaattggacaccatcaagagaaactatttataatgattctgttaaattagctcgtggtaaagaagtacttggaccaatagcaaaaactatcaccacaaaacaagatagaaatccaaatgccggtattataatacacgaattgaacttggatggtaataaagcgccctatcgtaacttaactccccgtgaaacttttcttttaatgggatttgatgaagatgattttgataacttaattcaaaataatatgaatgtcaccaaaagtcgctcaatgttgagccactcaaagctacttaaactctccggaaacagcattgttgtgaacgtccttgaagaaatattcacacaaacatacagaatagacaatctgttttttaagaatgttcgtcatctcgatgtgcagcaacataatattatctaatcctcccagacaaaaagaagcacaatctgcaagcagattgtgcttctttttgctcaatcttaaaaatgaattgtgtaagttttatcaccattatcttctaataacaaatgttgtttgccatatcttagaaggtccgagtattctatcaaattatcctttgagatattcaatttttttgtaatataggacttaatatcttgttcaaaatacatccttctagattttcgttcatcaacatatgccgtaaatatattaccctcatcagttttaaatataattttctccccaggttcaaaagttgctgtaaatggtgcattgttagatgcagttaaatagggtttcttttgattgataccagcttgtttcgacttatcattttcaaaaagaactggtacttcaaagccataatataattttttagaacctacaacaaatttactttgagcttttttattttcactttgctcagctatggcacccgcttctatttggatatcgtcctcagcaatttcgtcttcaagctttagagtctcgtcttcgtagatattaatatccaattctattgatttatcaatacataacttagactccattttttgacattcgaaaatagcagctgaatcaatttccgcctcactcattgattcatgccaattaaaaaaaccattctccgtaaaattagcagaaccgttaaacgaaattatccttgcatctgaatacataaaactaagcaatttaatatgcgtaaccggctcattaatctgataaaaaacattcaaattatcatatcttgccatcaacgctttaaacccactgtgatttcgtttactaataccttgcggtgtcatccctaaatataaatctatattgagcttcggaaattccgccataactcttcctaagaacgctgctgacccataccctgaaataatacataatttgactgcatttttagcattatttagaattatattttggtataatgctgaatcataaaatttcgccattacttttcaccatcaactgccttatataatccttctacataaccctttaattcaccctcagctaattctggagacatcgtcctagttttcgcattatttaaaatcataacatgccgaaaagccattcgatctgttttaccagcatattgcttcataatttctctatatagcggaacattgtaaccaagagtactaatccggtcaactaattgcatgattgtgtccgtagaattatcttttaagatgcgaattgtttcttctgaagaaccttgccatccaagattgatataccaatatatcgttttaagccaaattcgacgtgtcttcttataaaaatagtcctctttcattccttgtctacggtaaacaaggtctggaacaactttcaacgataagaaacgccagatgttatcatctgtcgccattcgatttgttaatcctttagaattaaacaagttatacatctttaatccaaagtacaaatcaattatatattttttgtgttcaattccggtgctcaaatcatgctcagaatacacactttcccataattccaataattcttgacgcaattcctggaattcaccttctatagaaaattgctcttctcttatcgaatcaatatccattgtatcgaaatctctttgcgcgcgatttagatcataatttggaaatgaaatcatcattaaaactccctaaaatttatcttcattcattcgaattgagtttgaaatacttactgcatcaaactcactcttactcgtccgaatattaaatgattttacccagtaccaaatcattttagcaatcgttccattttctgcatcttcaaaatcagttatatcgtaaccttcgatttgcaatgcttgttgaataatcatagtcattacttgaatcagaatttctttcatgatatatcgatctgagtatgtccgtgaatcaacaatcccattaaatcgcgggtgtgcactattaagcttcaagataacactagactcatctaacgtatccaccattggatcgctccattggatatccaaattccataatgggtcccctggtcgatcgatttccacaattggaaacattgatccattaccatcaacaataaattgatatgttagtagcgggtctgttgtcatatgggttccaacaattcccgcttgaccatctaaatgaatacttatttcctctaagtaaataaaaaattcaattgagaaactacctcttaacaaacctttatgaaaatttttttcaaattcaataatacactcactatcctgattaggaatactatcaattttacaagtttcctgaaacccagacgttttcgaagcaattgtatagcctactgctagtttattggtactagctgttacacccgaatagccaaaaagaccactaggcttattaaaactaaatgccatactcaatattaaattattatcttctggactccaccgagggtcaaaatcattaattacgataggatccgatttgattgccgagttaatatcaaattcacattcttcaccatctcgatttgtgtacatcacttgtagcgaagtacttttataccccaccgttcgttgcaacgattttgttataaccgcgtataacggaattatatgagcgttcacttattattccctcctttagcaactttatttctgatatgaatacttggttgcatgctaaagtctcttacctttataactagtgcaccattaatcgttacatcatcatccaaattattagtaacctctaattcactgttcaaactacctgatacttctttaatcgttaccatattcgctatttccacagcactattatcagacttactaattatcgagcccttaaactcaaagggaaacgatacgaccccttctaactgactattccatttctcctcattcattaatccatcatttgttaatacttcaattgtaataatatcattagaattttttgttaaaaacgcctcatactctacacgtaattgttcatcgctaagtctcataacattttcaatctttatatcactttgttgagacatatgtgaaacactcggctttactgtcttttcgtcgttaccattatcactaggtgagcccgctttcccccaaccagagggtggtaatattgattgccccacctgtcgcgataaatttgaagttctcgaacttattgcattttgttcagtttgattaacaacttctcgtagcgaacgtgaaatcctatctcgaatcctcttgattaaagtaatattagttttatctttccactcagcatgatcagcgctttcagtatctcttaagtaatcctccaagatatcgtagccatttttattgtagtctgagtgaagttttgccgaactgataggaacaaaaaaggctagtaagtaagtattatctggaatattcactttctgcatccaaggtgacgcatcgttgacgtattctacaaccattcctggcttgcgactgtatgcaataataccttgcccttgctgtccatcatcatcattttcaacgcctacataccgactcggtgttaaatcttgatcgccacctactaaatgtaactcttcgaaagaaacctgggtgaacgctactcgtcccaatacttcactggtactggtgagtgcttttcttaaaccggatatttctttaacttctatatctgatttaacagctttaccggttagagcactgtcatataatcttctaaaaattctaaatgtttgttcaaattctgcaggttgtgcataatcgccattaactgaaacaattaattcggaattaccaatttcttgacggtatttactatttaagattcgcggtccgtaccatctctgtacggctaactttaatgaagtgttaagttcagctgcaaaccacgggattttctcatcatcaacacttctatcatttgttaatttatctctatcaatatatggaataataattgtcgtaccagtttcattatccacgtatggatcaacaccaaaatctgaaataattttcctaatctgtgccgaatcaacaatcgggtgtgttccagattcagccacattattttctccccaccaagcaagtcccatctttgaatctagtagtgggttatccccatctggattttcaattaacgatcctgctagacgttcttgataagtcccatcagctaacttcactcgtgtatagtagatgacaatccccgcaccgaccctaaaatagcttgtttttcctaatccccatgaaccaccagcaccttgttcatcttgattcattgagagtccataaactaacttataaaatttactttcttttaattcggtatcattatctgttctggtatcaattgatccgcttaatcctgatgtgtttttgtcttttaaaactaaagcaagctgctcgcctggaaatctattaaccaattcagattcgatttcttcaaaatgatacgcaacagcagtactattaaatttattcgtctgaatttcaacaactgtctcatcttcatctttattcgtagcatctaaactattctgaagggcttcacgaattacaatatcagcgtagggcatattctcattttgcaaacttcgcaaaatacctttaccgtcttgcgccattaggctacgtggtaatttatatatttgcattctagtctcctaatttattcatcctgatctaaatcttctaagttttcaggacgcttaatccgtatttttctaacatgctctttaccattactatctgggtttaattgactcggaattaataaattcataccaataatatcttctgaaaattctagattctggcgttttgagttctcttttacttttgaatccttatcaatccgataaataactaacaacggcgttttcccgtaattatattcatatcgaattcttcgcataacatgttgttgagctagtctttcagattctctcaactgcgcatttaattcacttgtagacaagtttaaatccgcgtataaatctgttggcgcacgtaatgcaccaatgtttgccaatccttctgaacttttcattttagctgtacgagtgattgctcgaggtgcgtacccctttatattccaagctgaatcccgattggcgatagggatgttactggttgtactaaacacaatattccaatcagtaaaactatcagggtcagattccataatatccttataccattttaaaagcccgctaatattattaaaagcagtatcttcttcggcaaaatggaaggcttccaaataattacatattttttcaaaaggaacatcagtccaatttaagtagccttgttcaatattggtatcactaaacgtttctaaaccatttaaaaattgactcgttaggcgaatatttgcgcttaatgtatcagcatcatttttaaaaagtacggtttgcttattaaaaccagtaaagtcaacttcggcttcttccgcactttgcatcttgttatttgctgttactcttaaaaattgtagagacggtgaataatttaccttaggacgataatcttctggcgcaaaagttcctctttctgacatttcggtaatttcttcacgtaagtcatctaccatttgactcataaaatcaaaccgttctttaatgatattggttaaccaaacacgtgggaaaatttcatatttttgccggtaaccaaaccaacgccccatctgcataagtgtatccgcttggcttgttgctctagtaaagtaagatgtaattaatccactaagtgttaaacctcgagatagcgtattgcctccaataacgataaacattggcgtaaactccgcttttcccttatcaggatagattaaccgtagctgttcatctttccgcacttgcggattactattatcaacaaccatatgaaaaccatgatgatactgtaactcaccattatcatctattttaattgtagaaacataattatctttatcatctaatacacgttgaacttcttctcgaacatctgcccatttaggataatctggaacgatattgggatttgaatactgcggcataccatctaaaaagctctgacgtttaaagtccaatctttctcgtctatagatttcttctagatgtttaacatactcatatttatcttgtgcgcgttgcaataagtacttctctacggattttctaatattttcatgatcaacttttttctgactagtatgaattagcattgatgtcggttttttaaaatttaaaaaacgtagtgcacatgaagcaacaaaataccaatctaacgcatcttttaacgaattaggtatctcatctatttcacctttttgaatatccttaatatcaagaacatcattatctggtatcgataatacaatatcaacggcactattcgtttctggctgttctaggccaaatatttgttttggcccaatataatcatctgatggtgttagctgaacaataaaatcacgcggatatagagattcgtcaccaacctcattcagaatattagcaaaaggcgttgccgtataactaatataattaactgctcgtaatttcttatcttgaaatccatttacaatatctaacatatgttggttaatttgtgtccggtcattctcgtcgttttcatcattactaatcactttagtattgatactaccttggtccgcttcatcatcaataattagcacttttaacccagctcgtgcggacttagatttatacaaccactgcttaagttgcttcatacgcacagtattctttaagcaaactgtaaaatatctctgtttactaccctcgcttagatcaattttagcccatttatgttctggtgccctctctgcagaactcggattagcaatccgattccacgatagattagttcccggaatctttaaatcatcgtacattcgatcctcggtttgcttacgcaaattatcaataatccctgaaaaaataataaaatagttgaaccctaaatctgccgccatagaaataagcccagccatatttgcagttttccccgactgaacgttccctaccactaagcctttcaccgcgcgcccattatgatcctcatcattctcaatatatgttttagaatccaactgctgcaaaattgcatgcacagatctctgtatttcatctaccgatgtctcagagaagccattcttaagtaatctcttccgataattaacccactgtgacccggatcttgttggtacttttgcagcatttcctgagtgactcgttaatttagttatcgccgattttttatcaatagactccatataatcgacaagttcatgccaatcttgcattgagaactcaccatcgaatttcccacgtcttcgtaatagtttaagttcaatcgctaattcatctggtgttccatagctatcatgaatatccttccattcacagccttgcgatctttgatcccttattgagtttctaaattcttcatatacttcactagaataatccatatttagacacctatccaattcatattttatgtatatcatttacattatagtcaaaggacacaacatttcataggccctatagaattaacactacttctattcgataattaaaacctctcaattttaaaaaacttttggtagattgtaaaattaatccgaacgctgttcggacaaaaaagatcagcttcctttaaaatggtgtttaccacaaacccatcttttaggagctgatcttttgtctaatataacctattcctttaacgtgctttcaaaagcatcctattccggttagctacacaagtcaaacgattgcttacagcaatcattcgccctgttaggctaatcctcacaggataaccacttttgacgcacttctattttttgtgtttcttgttcagaatcttgtcgaacaagttgttgtcttgtgggttaactgagtcaccacttgcgactgcaaatgcttttagcgcatcacgttgtttactgttgagggtctttggtgtcacgatgttaactgtaacgttttgatccccattacctgtcccgtggagcttaggcgcacccttaccacgtagacggaagacagtattcgtttgagtccccgctggcacttttagtttaacaggaccatggactgtgttgacttcaatttcatcccctaaagcagcttggacaaagctaattgggacttctgaataaatttgtgcaccatcgcgcttgaattcagcacttggtgccacgcggaagacgatgaataaatcgccataagggccaccgtttgtgccggcttcaccttggccttgaagacgcatttgttgcccatcttcaacacctgctggcactttaaccttaacagtatgccgttcatcttcgtgacctgtcccatgacatgtttcacacttgtctttaatttctttaccagtcccgccacagacatcacagacttcttgagccatcatgcggccgaaagctgtttgccgttcaacttggacttgacctgcgccgtgacatttgtgacacgtttgggcgcttgttcctggtttagcaccagagccatgacacgtgtgacattctgattcacggttataagaaatcttggtttctttgccgaaaatggcttcatcgaacttcaaatccatccgatattgtaaatctgaaccttgacgaggagcgtttggttgttgccgagcaccgccgccaccgaagaatgaactaaagatatcttcgaaaccgccgaagccttcagcaccaccaaagccgccaccgaagccttggcctgcgccgccgccgaaaccaccgttcataccagcatgaccgtattggtcataagctgcccgtttttgtgggtcacttaatgcttcatacgcttctgtgacttccttgaacttggcttctgcatctggggctttgttaatatctggatggtacttctttgaaagtttacgataggcctttttaatctcatcatctgaggcgtctttacttatccctaagacgtcatagtaatctcttttatcagccattgtgggcctccattcatatacttacgcgttaaatctatcctatcaaggatagcataattgactgattaaaaaaagccaaggccctagaccatactaggttttggctttttttaaaacgcattattatttgtcgtctttaacttcttcgaagtcgccgtcaacagtaccatcgtcagacttaccgtcagttgcattaccttcagcaccagcagcttgttgtgcttcttgtgcttgttgatataacttaactgttaattcttgaacgatttcactcaacgcatcgcgttttgtcttcatgtcttcaaggttgttttcttgttgtgctttgactaattcttctttagcatctttagccttttgtaattcttcgtcagaaactttaccttcaagttctttcaaagtcttatctgtttggaagattaattgatcaacatcgttcttcaaatcaacttcttctttacgtttgttgtcggcttcttcattttcttgagcttctttcatcatgcgatcgatttcttcgtctgataaaccagagttactcttgatagtgattttttgttctttatttgtgccaaggtctttagcagaaacattaacaatcccgttcttatcaatatcgaatttaacttcgatttgtggcacaccacgaggtgcagcaggaatatctgttaattggaaacggcctaaagtcttgttatcagcagccattggacgttcaccttgtaagacatggatgtctacggcaggttggttgtcggcagctgttgagaatgtttgtgccttgcttgtaggaattgttgtgttccggtcgattaacttcgtgaagacaccgcccattgtttcaatccctaatgataatggtgtcacatcaagtaaaacaacatctttaacgtcacctgagataacaccaccttgaacagcagcaccaagagcaacagcttcgtcagggttgattgagtgatcaggttccttgcctgtccagttcttaacagcttcttgaacagcaggaattcgtgttgaaccaccgtttaagatgactttgtcgatgtcgcctgattctagaccagcatctttcaaagcattcataacaggtgcttttgtccgatcaactaagtctgatgttaacttatcgaattcagcacgtgataaagtcatttccaaatgtaaaggaccgttttcgccggctgagataaatggcaagctgatttgggtgcttgtcacaccagataaatcttttttagctttttcagcagcatcttttagacgttgcatagccatcttgtcttttgacaagtcaataccgttgtctgatttgaagttttcaactaaccagttcatgatggcttcatcaaagtcatccccacctaaatgtgtatcaccgtttgttgataatacttggaagacaccgtcgcctaattcaagaacagaaacgtcgaaagtcccaccaccaaggtcataaactaagactttttcgtctgtttctgtcttgtccaaaccgtaagctaatgctgaagctgttggttcgttgataatccgtttaacatctaagccggcaatcttaccagcatctttagtggcctggcgttgtgaatcattgaagtaagcaggtactgtgataacagcttctgtgacttcttcaccaagataatcttcagcgaatttcttgatgtattgtaagatcattgctgaaacttcttgtggtgtgtatgatttgtcgccaacagttactttgtaacctgcttcgccgatgtgacgtttgattgatgcgattgtatcagggttagtgattgcttggcgttttgccacttcaccaacttggatttcgccgtttttaaatgacacaacagatggtgttgtccgtgcgccttctggatttgtgataatttttggttgtccgccttctaatacggcaacagctgagttggttgtccctaagtcaataccgattactttactcataaaaaataccctctttttttagatttttagtttaatttattgtgcaacaacgaccattgctggtcttaagacgcggtccttcaagtagtagcctttttggaagacttgtacaacagtatccgctttttgatcaccatcaacagcgaccgtttgcacggcctgatgaatggtcggatcaaaggcttgtccttgcgcctcaatttccttaacgccatgatcttctaaagcatgtttcatatgatcgtatgtcatttgaacaccctttttaagactctcagcactatcatcagttgcttcagttgccaacgcacgttctagattatccaaaacgggtaagacatcttttgcaagtgattgcccatcatattttaacaagctagcttgttctttttgatgacgggtttgaatgtttttaatttcagcttgtgaccgtaagaaactatcttctaaatcatcatatttcttttggagttcagcaagttgagccgctaaatctggcttagctgcatcttcgtcaggtgcagcatcttcgatcacttcatctgcttctaattcaggttcaaatggcgtttcttctttaggtgtttctgtttctggcatttctgctactggcttttcttgtttctcagccttttcttgcttggtcaaacaaacacgctccttttaagattgatcatcatcgaaattcgcataataatcaattaatttcttcgctaactcttcacggaataaatcgagtaacccaatcatccgcgaatagggcatactagtggggcccagtagtgcaatgactccctgtccgtgttcaccaacgtcataattaacagtcattagactataatgtttcaacagatcgttggccatctcggtgcccaggcgaacctgaacttggctattggcgcctccaggggacaaatctagcaacttggctaaatcatctgaacgattaatcatgttatacaacgacttcagctgggtgacatcggagaactctgaaaaattcaacaagttcatctgaccgccaacaaataagcgctcttgactcgcctttttcaaaacatcgtcgaagatgtctaaaaagccggtcggagaagccatgtactgggctaatagcgccggtacatccgtctttaacttctgactaaccacggttaacggtaagccaattaggtgatcattaatgattcgaatggctttttcgagttcatcacccgaaatcgcttgtggaatggtaaatacctgattatcaactgtccctgcactcgtcacgataatcgccatcacttggtgattactcaacggtactagacgaaaaccagttaaccgaatctcagccacttccggtcctaacgcgattgctgtatagctcgttaggttcgataagatattagccgattgtgagacgatttcatcaatcttatgatagtgctgtccaaatgattgttggaccgttgccacatcaaccggattgagggttgctggttgcatgagatggtctagatagtagcgatagccttgcatcgacggtacccgtccagatgacgaatgcgtcttctcaattaaaccgacactttccaaatcagccatatcattacgaattgttgcagaactaacgtgtaccggcaattctgccattaacttcttagaacccactggctgaccactctctgtaaaaagacgaataatttctttcaaaatcattaattgcctttcggtcagcatgtcatcacctctttttagcacttgaatatcatgagtgctaattacaattattaatatagcaagaacgtcaaataaagtcaagaaacgtaccggcttttttacggatttactgaaaatcggtccttagacggagggccttactggaccaaaggacaaaataaaaaacgagccgcttcttagatggaagagactcgctttatgaagtggaatatttataacgtgcttttcaaaccatattcctgtgcctagcgacacaaggcgaatgctcagaatatcccccggtttgaacgcactcaataactatctagcagaaactcttggaagacttcattgcctaagaacttacctgattcagttagtcttaaccaatcgccttcttgtttgaggtagccctttgcaatttgggtggcaactgtttcgccgtaaacattttgtaatggataattgaatttatcttgaaaatgactgatggatacgccttgcatcgtccgtaacccgaggaagagttcttcctccatttgttcggtcagtggcagaacatggcgttcaatgactggcaccttattttcttttaagggttctaggtattgttggattgggccgaagttatggtaacgatccttacctaaatagccgtaagcaccggcaccaaagccaaaatacttttcattgcgccagtaagttagattatgcgcagattgaaagcctggcttggcaaaattactgatttcatattgatctaagccagcccgcttgaaactatcaatcgcggcttgatacatatgtgcttcaacatcttgcgatggtaaatgcaacttgccttggcgcatcaagttatagaagattgttttgcgttcgagaatcaatgagtacgtcgaataatgcggtaagtcgagttcaattgccttattcaaactatccatgaaatccgcttcactttgttgtggtaagcggaaaatcaaatcgatactcatattttcgaagccgaccttgcgcgcgttatcgattgcccgataaacatccgcacttcggtgaatccgcccgatctgttttaaaatctgatcattaaacgactgcacgccaatacttaaccggttgacgccgttgtccttcagaacttgcaatttttcagtatcttgtaagtcattaggattggcttcaaacgtaaactcaccaccctcataaggtaagtattgatgaatcccatcggttaaacgttggagttgtgctggtgataaagtagttggtgtccccccaccgacatagatcgtatcaattggttcgtctgggtattctgccatcactaattgaaactcgcgaatcaacatatcgacataatcatcgaccggttgaccttcaatgaaaaccttattgaaatcgcagtagtaacaaatatgctcgcaaaatgggatgtgaatataagcgcctgccattaatgttgtgcctctaatttctcaaaataagttcgggtatcggcttcgtcttggtggagttggtcaatcaaggcttccgcggagtcaaacttcacttcgccgcgtaagtagtgataccaatccactttcacttgttcaccgtaaatatcgccattgaaatctaataagttaatctccaccgttaccgggttattgctgtggaacgtcacattccgaccaattgaagccatgccaatataccattgaccgcgcactaaaaagcggaccgcataaatcccaattcctggtaatcgttctggtcgttgcgattcgatgttagcagttggaaaccctaattctcgcccgcgtgcttcaccatgcactacttcaccggtcgtttggtaaacataaccgagtaattcattagcttccgcaatcttaccagcatctaaatcctctcgtactaatgtcgagccgattttgacaccattatggtcatgttctgcaactgtcacaatggcaaagcgccctttggcatagtctgacaatgtcgtcatattcgcaatctcttttttaccataagtgtaatcaaagccagccaccactgtatccgcatgtaaagcgactaagtattgatcgacaaatgtttgtggggctagttgtgcaaatgcttcattaaagtgcacgatgtagaaaacatcaacgcctaactccgccatcaattcttgcttgcgctcaaccgttgataaataacggaatgactcccgattggcattgcgataaacaatggcaggatggatatcaaacgtcatcacagctaatagtaaacctttttgaactgcaatttgttttgctttccgaattacagcttgatggcctcgatgtacgccatcaaaaaagccaagcgccaagaccacttggtcagctggcacttgttcttttgaatatggatgaattaattcaatgacacgcatatttttcacctagttttttttaatgagtcccttgattttgtaaatacattttataagggcgataaagatgttgcgctgctttttcaacttgatagagcgccttgatatgcccttgataggtcaacgccacaatctcatcggtttgttctggcaatgtcaagaacacaccgtttaaaagcttggcccattgatcgtcgtctaaagcaatcttcttgtaatcttcaaatacatggtcaattggcaataaaacgtctgccagttcgcccgcttcagctttttgcgccaattgttccaacgtgatacagttaccaatttgaatgccgccactcttaagacgtgtcaaatcggacatcactgcgggtaaaccgagtttacgaccgaaatcaacagctaatgtgcggatataagtcccctttgagcaaccgacaatgaaccggaatgtttggcgcccagattctgcgtcaaattgtggttcaccatccaaatcaaactgcgtaatcgtgattgaacgttgtggccgttcgactggatcaccagcgcgcgcatagtcgtataaacgccgcccattgactttcaccgctgaaaacatggggggaatctgaattgaatcgcccagaaaactagcgagggtctctttgattctctcagttgaaaaaggttctgttaagcgcgcctcttcaacgacttcaccatctaagtcttcagtcgttgttgataagccaagggtgatttcacccgtgtagactttaccagaatgcaccaattgatcaacaaccttcgttgcttgaccgatacagattggtaacaccccatcgacgttgggatccaacgtgccagaatggcccactttcttcatgtgtaaaatgcggcgcactttaaacacacaatcgttactcgtcatgccgcgttctttatataagggtacaatgccgtccataagtaatctcctttaagtattaactaaactattatagcatagagtgtgaagtcgaacgggattagctttatgatgctgctcaatttattatcaaagcacaaaaaaagatgggacaaaagaaactcttgcccatcctcgctcaatgttgttttattagtaaccttttttactcagaaaaagtgagtcctttattttgaaaccgactatcgatcctagcactttttaattcgatcgcaaaaataatctctttttcctgttcttctttggataaactctcaacatagcctggtacttgtttttgataggcctctgctatatcactaaaacgatactgagttcggtataccttgagccggttactcgtgattcacaattcttcactagtcggtagcgtaaaaattgcggctcgccccaaatcgagttcactgactttcgacgcttcggggtcggtgccaaaataccagacattcggtatcccatcaagcgtgacaaaattaatctgtcgactagccggttgtcccaggttgttcgctgtactcagcaccattgtattaaactgcttaacatatttacgaaactcgcttaagttattttgatacagctctgaactaaccggctgactatcaatataagcaatcgcatcatcaatcgtttctaatgccgggttagcctctaaataataaagaatctgtggaataatgtgggatatttctcgttgataataataaaactgcaaccagcgattagatactgataaggcctctgtataacgcttaacaattcgccgccgatagcgttggacgatatattttaacggtcgatatttaatcaacttttgaaagagcgctaaactcaatagaaagattaaaattgcaactaaaatattgattttaacaatcccccatcatcggccagtgttcatactgcataaaaacattatacagtatcgtcaaaaaaggcgtgaccaccgccgcacaggcaattactaatcgccgtttaaaaacgcggcgtttatgggtcatatcttcgattattttttggcgttctttcatggtccgctcacgagtaatcatctcatcaatcaccacttgatctgcttcagaaatcatcggcaccctcctcaaaagcatcaaagcgttggcgtaattcatacgtccccacatcagcaaaatcagaaataatgatattttgtcgctgttttcgcatgtctgctgcaccatatttagcggtatacatctcctcagcccaagcgagacgtttctgtaaccgctgttcatcaaatgttttaacgacgccttttctaatccgatgttatttcactttattcattaaataaagactgataaagaaggctgcaaaagcaatgatgtagagcaagaaaacataattggttcgttgcaatagttgtttaaaagctacgcgattaatcggaatgcgcgtttcacgagttagatagagcgcaattgtactcgaggtcggtacaaagcacattaaccagccaatcccaattaacactgattgacgcaaatgatgacctgttttttgagtggtaaaaaaccaatcaattgtaatctgatcttcgcttagctgatgacgaatataatctggtttactcatttgaatccttcccttctggttttccagtgacttcagtcgaccgttttggtgatttccatacacccgcatctttacctcgaatgatttggcgaatcgttggcacaatttcgactgctacggtatatgtattaaccatccaataaatcaagatataccaaggcgcaaaggcgatatacttcaacgaacggccgccatcgttaaagtaagacgcttgtaccagctgaatcaaccctaccaatatctcgattgtgatgaaaatccctgaaaatgacagatttgagagtagccgatgccaatcatgattaatcagataacccatttgaagcactacaaaggtcaccatactcatccagtaaaataacgaccaaataatactcaaaccataatcgataatacttggcaccatcgaaaagtgcttaatcgggtgccgtaaaatgctaaacgattttgttaagagcacgtaaatcccaccggaagtccatcttcgccgttgcttaacgagttctggtaatgtttctggcacatccataaaaaagcgaatgtgcggtgcaaaatatgcttgccaccctgcagtctgcatatcccaagaaatcgcaatatcttcagttggttgttctgcctgccaaccaccgacatcgatcaccgctgccttgcggtacatcgtattcgctccagaaaaggcaaacagcccaccgtaagaaagttgcgaccgtttaattaagccaataattgaatttaattcattttgttgagcttctgcgactagcgttgtcttattaatcgacaacatattaccagtcacggcgcctaattgagcgcccccttcccgctcaagataatacatatacttccataaggcatccacttcgggtttcgaatcagcatcgttggacagaataaattcacctttagcaaatcctaaagcactattaaaacccgccgcttttccgcgattattaataatcgtgagcgttcgcaagtgctgcccatattttgcttgtaattcttctaaaataatgccagttctatctgtcaagccgtcattaacgacaatgatttcatagcggtcagttggataattcatttgtgtcgctaaatgatcaatcgtcgcctgaattgacgcctcttcattgtgggctggcactaaaatcgtaataaatggcgtctcctttttaagatagcgtggttggtcagccttttccatcaataaccaataatataaactagagacaataagcgataagcccccaataatcggatacgaaacgagcgtatagattaatatttgagttaaatagtctgtcaacaacatgtaagcgtcctcattttagattggattttaatcagttaacaatgaattcacattatataactcacttgccgcgctaaaccataaaatatctgccaataacaatagtttcattaattcaatagtaatatggtgcaaacgactaagttaatttaatagattatcgcttccataaggtcattcaagcaaaaaaagagccccgctttcgcggggctctttttcacagtttaacgctgtgcttcatcttcgtgtaacttacgtaaaagttcgtcgatatgttcaccataacgcactgaaccgtcttgttcaaaggtgatttctggaatcttgtacaacttaatccgttggccaagttcgctgcgaatcaatcctttagctttatctaagccagcttgtgtcttttcagcgtcacttgctaagccagataaaatgctgtaataaactttaacatgttgtaagtcaccactgagattaatatcagtgattgtgaccccttcaactcggggatcacgcactctttttaataaaatgtcatttatttcgcgttgaatttcttgttcaacccgaccaacacgatgtttcattgcttgtcctcctgtaaattaattatttaacaggtacttcttccatcacgtaggcttcaatttgatcatcaatcttaatatcattgtaatcttcgattgtcacaccacattcaaagccagttttgacttctttaacgtcatctttgaaacgtttcaagcttgaaagtttaccttcataaatcacgataccgtcacgaattaagcggacaccactatcacgttggataacgccagtgtcaacgatacaaccggcaattgtcccgatcttagaaacattgtatgtttcacgaacagttaattgacccgttactttttcttcgtaaactggttctaacatacccttcatagcagcttcgatttcttcgattgccttgtagatgattcggtgtaaacgaatatcaacttgttcagcatcggcttgaatcttagcttgtggtgttgggcgaacattgaacccgatgatgatggcgttacttgcagcagctaatgtgacgtcactttcgttaatcgcaccaacggcttcatgaataatattcacgcgcacgccttcgacttcaatcttccgtaaactaccagccaaggcttctgttgaaccttgtacgtcggctttgataataacgccaacttcttttaattcgccttgtttcattgtttcgaacaagttatctaatgtgacagggtttgaccggctacgttccttcaagagcgcacgtttggcacgttcttcaccagcagcacgagctgttttttcgtcttcaaagacaacaaaacggtcagctgcttgtggcacatcatttaacccagtaatttcaactggttctgatgggaagacttccttcacacgacgaccgcgatcatttgtcatgacacggacacgaccaaaggtattcccaacaacgattggatcaccaatcttcaatgtcccttgttggatcaagagtgatgcaacaggtcctttacccttatcaagacgggcttcgatcactgtcccaaccgctttttgatctgggttagccttcaattcaagcacgtcggcttcaagaagcaccatttcaagtaattcatcaatgttttcaccagtcttagctgagatcttaacaaagatggtatcgccaccccagtcttcaggaacaaggccgtaacccatcaattgttccatgacgtgatctgggtttgcgcctggtttatcaatcttattcaccgcaacgatgattggggctttagcagccttggcatggttgatggcttcgattgtttgtggcatcacaccgtcatcagcagcaacaactaagatgatgatatcagtgatatcagcaccacgcgcacgcatgttactgaaggccgcatgtccaggtgtatctaagaatgtgattaaacgatcgtttaacttcgtttggtaagcaccgatatgttgcgtaatcccaccggcttcaccatcagtcacgtgactgttacgtaagttatccaataaggttgtcttaccatgatcaacgtgacccatgattgtgacaactggtggacggctcacaaggttggcatcactcttagcttctgtttcaaatactgaatcgatatcagcaatatccacttccactttttgttctgcttcgatgccgtaatccgttgctaataattcgattgtatccttatcaagtgattggttcatgttaaccataatccctaacatgaataacttcttgataatttcagctggttcacggtgaatcttcttagcgatgtccgcaacgttcatgccttcagagtaaactaatacttctggtaatggccgttctttacgttgtggcatttccttcttagcagcattttgttcagctaattgttgcttacgggtcttcttacgtttcttattgaaacgttgttgattgttaccgtagctgttatacccgccgccacgtttcttatctggaccaaagttctttggcttgcttgctgtattgtttgatgctggtttagcagcactcaccgtattagcttgcattttttgttgcatttcttgtgccgaaactggccgactttggttcgagttgttattaggacggctgtttgtattgtttgctggacggccgttgttattgctgtttgcaggacgattatttgttgtcgttgggcgtgcgccggctggcttgttgccggctggacgactgctgttattaccgtttggtttagcagctggccgtgggcggttactttgttgacggcgtttcttttcgtctgcttcgcgttgttcacgttgttgttgaatgcgttcttgcgttctttgacgacgtgcattagcttgtgagatttgttcttgcaagctcaatggttggtttgacccagctggacgcgtattgccgtttgtccggttagccgcattattgttagggcgaccattattaggacgggcgttattgttgttaggacgaccattggcattgttgcggttttgaccatttgatgcttggccattccggttgccttgtgggcgttggttgtttgaacgaggtgctggtttgctgctagcttctggacgacgacggatagcggctttgttaatcttaatcttaccgttatctgttttttcgcttgcctttggtgcagcaggtgctgcggctggcttgctgtcagttgtcgttgcagctggttttgttttcttatggaagatggctctcaaagctttttcttgattgtcatcgatagttgccatgtgattttttagatcgtaaccttttttaacggcagtttctaaaagatctttgctggcaacgttaatttcttttgctaattcatagatacgttttttacccatatcttcacgctcctttattatcccagtagcgttatcatctttttggcaaacccggcatcaacaaccgcgatggtggctctatgtaatccaattgcttgggttagctgggccgcggtatacgcttttgtttccgggatttcgtagaaatgactcttgtcagtcaatttcttctgtgtcagttggctaatgtctgagccgataaaaaccaatttcgctttttgctgctgaatggcttttaggacttgttcttcaccactgaccagttgccgtgctctcatgcaaatacctaagagttgtaataaacggtctggttgttcactcattttcgttctccaaataattctagccgagccttttgatgatcaacatattcgaataattctgtataaaatgattctgcaacgtcaatcccaaacgtcttttctaaaattttcttgctttgggcggtcttgattgcatcaggttctagtgaaacataagcgccacgacctgatttcttaccagttgggtcaatactaatctcaccttcggcagtctttacaatccgcaccatttcttttttaggcttcatttcttgcgaaataacgtcttttctcattggtacttttctttgtttcatcatgaacacctcacttattcttgtggttgttcttcagaatcaacagcagaatccgttgcttggtcttcgaagccttcaacagcttctgttgtttcttcttcaaaaccttcaacgactgcaccttcatcttgactatcgtcttcatcaacgaattcgacttcagattcaggtttgatatcaatcttgtagcccgttagcttcgcagctaaccgtgcattttgaccttttttaccgattgccaatgacaattgataatcagggacgatgactgtacatgtatgttcgttatcaccgttaaattgaacagcgatgacttcggcaggattcaaggcattggcgatgtagtctgaaggatcttcttcccacttcacaatgtccatgttttcgccgtgtaattcattaacaactagttgaacccgttgtcccttaggcccaacacaggtgccgactgggtcgacgttggggtctgttgaacgaacagccatctttgtccgatcaccagcttcgcgagcgattgagacaatttcaacggtgccgtcataaatctctggaacttcttgttcgaataaacgtttcactaaatcagggtgtgtccgactaacaaagacttgtgggcctttagttgtattttccacttttgaaacgtaaaccttaatccgatcatgtgcttggtattcctcgtttggaatttggtcttgcttgcttaaaacagcttcgatcttgcctaagttgacatagatgaacttgttatcgcggcgttcaacgaccccttgcataatttcgttttcgtattggctgtattcattgtaaatgatacttctttcagcttcacgaacccgttgcataatcacttgtttagcagtttgggctgcaattcggccgaagtcttttggtgtgacttcaaaacgaattgtatcgcccacttcgtatgccttgttaatttccaaagcatcttggtagctcacttcaagacgtgaatcaaacacttcgtcagtgacttctttgacagcatagacgtggatgttacccttcttttgatcgaattcaacttccacgttttgtgcttgaccgtaattccgcttataagcagaaacaagtgctgcttcaagggcttcaataacaatctcttttttaacgcctttttcttgttctagcgcatcaagtgcacctaacatttccttgctcatgtaactagcctacctttactaaaattcaattgctaagcgagctttggcaatttccttacgattaaacgttacttctttttgacgcgttttaattttaatcactaaagttaaagtgtcatcatcaagggcttttagtgtaccttgatagattttctcgccatcaacagcttggtataacgagatatgaatgtattcgccaagtgctttttggaaatcggcttccttctttaaaggacgctctgcaccaggtgatgaaacatctaagaaataagcctgcggaattggatccgggtcgattgaatccagtttctcacttaacgcatcgtttactaaggcacaatcttcaaggtcaatgccatttggtttgtcaatgaagacgcgcagataccaactgctaccttctttaacaaattcaatgtccactaattcaaaatggtgttgatcaagaatcggcacgatcagatcgtgaactgtttccacaacggtactcaaatgattccctccaattcatttttatatttcagattagacgtgctccaataaaaagagtgagcatttctgctcactcgctctgaagtatctaattactgataacaatataccatatttttcatgaaaatacaaacaaccgctttaattttcagtggttgcgacgctattttgcgtcttacccgtcgtcaagatttcatggaagttttcaaaactaatctcgaccatgttcttgagggcttcatcagtattcgaaccaacgtgtggcgtcaacaagacgcgggggtataaatcaatcaattcttgagtggttgcatctggaacaggttgatctgctgggaattgcttgaagaagatttcgccttcagctggtaacacgtcagcggcgaatgcaccaagttgatcagctttcaaagcatcgataatcgcacggttatcttgcaattgaccgcgggctgtattcaccaagattgcatcgttcttcatctttgcgattaagtccgcattgatgaattggtcgttttgaccagcgaagtatggaatgtgcaagctgacaatgtcactttgggccaataattcatccaagctgacaaaatcaagcacttccttggcgatttctgatggatataagtcgtaacccacaaccttggcacctaagcctttgtataacttcgcttcggtgtagccaatcttgccagtcccgataatcccaaccgtacagttgcggacttctttactgaacatcacagggctcacacggaaatcatgatgggctgtccgattcgttgtataagtggtatgccgcaataatgacatccctagcgtcaatgccaattcagcaatcgcgtttggtgagtaggctggcacgcgagcaacttccatgttgtacttgcctgctgcggccaaatcgatatgaccgtaaccgactgtccgagtaaacacgtaacgaatcccgtattcattcaacttcgctaagttttgcgcatcagcagcacagttcgcacgtaacaagaccgcatcgtggccttttgccgtttcgatattgtcgtgagtcaataagtcttcaattaacgttaaatcataatcgtagttgttatatttattgaacgtcgccacttcattcggacgaacgccgtaacaagcaattttaaacatttaatttccctcttcctagaaaatcccgatttggttaatcacttctaaaatcactaaccagactggcgtcatcacaacagctaagaccgttgataataatgacgcgttcgatgccaagaccgcatccttgtcaaaactaatcgcgtaagcagcggcgaccgttgccgttggcgttgccatcatgatgacaatcgttgccaaactgatgtagctgactggtaaaatgtgagtcattgttaagatggccaataacacgatatttaaagcaggtactaagatcactttgttaatactataaagccatgatgtcttgtccgaagcagcttctttgaaactgatttcgccaagtgttgtcccaattgctaaccaagctaatggtgaacataaaccagctaagtacgtcattggtttgaacaaccatggcgctgtttgatcaattcgcaagaaggccactgaatgcccagcaaccgccacttgtggtaatgcgccttggattaaccagatgattaaccccgcaaatgtggcgatcacgattggatttaagaacatgtttttcaagttcttcgattccatcttcaagccactcatcttgatgtacccatatgagtataagaacacgcgataaccaatgttgaaaattgagctatacataacccctttagctccgaaaacggcgccaacaattggaatcccgaagaacgttgttgaaccaaagatggtcaacacgcgcaatgtatcttgttgatcacccttaaagcgtaagtataacggttttgaaattaaaattaaaataatatagatcaagaagccccaaactaaaacgttgatgccttcttttaaagtcttcccattaatatcttgcatgaatgagttgaatgccaaagctggtaaagcaaccgttaaaacgacttttgacagaatcttcccaaatttatccgtgaagatctcgcgtttgcggcagtagaatcctaataaaataataaacactgtcgacgtgatcgaactcacaatatccatgttcgtaaacgtcttcgttaaaatatcgccaatactcatctgtactctcctctgttataacatttagtccgctgtattataacacggacaactggtatcgattataacaagaaagtaacggaaaagaaatagggcaaaagaaaaagagtgaaaaataacttcactctttctcagacctaaattttgtattcattttcattacatgctatatattaattatctaaactgccaaggaggccttctcatgcccagacaaagcatcttcaacatgtctctttccaaaatctaccccatgctcgtccaaaaagccgaacgcaaaaaccgcacccaagccgaagtcaatcagattatccgctggctagccggctacacccaaactgaactcgaaacccaactcgctaaagacatcccctaccaaacgttcttcgaagaagcaccgcagatgaacccaaactgtaatctaatcaccggcgtggtttgcggcgtccgcgttgaagccattgaagacccactgatgcaaaaaattcgctggctggataagttggtggatgaactggctaaggggaagacgatggagaagatactacgaacctagtaaaaaagagccttagtagactattttgcatagtctactaaggctcttttcaataaagcatactagtcctttggtgccggatacttttcagcattcttaatcaatttttcattgataatctcatcaatatcgaggcccaaattgtcagccatcatgtaactatagaccaacacatctgccaattcttctttgacccgttcaatatcttgaacgccttcttctgccgtcttccattggaataactccaataattcagaagcttctagtgagattgacaatgccaaatctttttcattatggaatggtcgccagtgtcgttcatcccggaatgcgttaattttttccatacttgtttttgtcatcattaaattcctttcttcagagcagcccttaattcatcatcaactgcgtaaatatataaaccattaacaccacgcgatagcagaacattcaattcattgcgtaacatgtcctcagaaacatcttctttggttccgtcttctaaagttcgacgctgcgtcgctttactattttcactggccgttttatcaaaaataatacgtccatttcgatacttcacagatggcccaatgatgacacccgcataattcaagtcaaaaccttgaatcgtaaaagtagagccaacttcgtcaatcgtctgtggttgttctgcccatgctaattttttattacgtcttttctgatccttgtcgtcaactggtacctgtaagttccacggcatttgccaatcatcaatcttaacgtaccatggatgaccattattatcttttccattcacatatttccaatcaaacgttgctagaatacgtgaaataccagaatcctcgttcttagctttagtttcaattgcgttttgtaatgcttgtggagtgtcaaacaacttaatctcatagcctttttcgtcatgtttaggtaacggtttaaccattcctcggtcgattaaacctctaatccatccaatggttgccgctccagcattaattctgagctgtttatttaatgtgaccaagttgccttgttgttcaacctcatctaaaagattatctagctgaataggttcccaatactgttcccgcgacagtatttgctttttatcaaagactgcgaccaccactcgtgcacgtttcaataaatcatcaagttgatttttcccagtatatgattgctttccttgagttaagagtaagtgtgcttcatcgacaatgacaacatctaccggttcgtttactgaatatttattgataaacggcgtcggttttaaaactgtcttttgcttatcactcgtgtaaatatctaatttttgagcaatttcctcgtaaactttcaattgctgatcatgattgactaacaagaactggctagtccctcttaaaatgggattttctgattcagcttttgaaagctgatttaattcataaaataggctactcatcaacactgtcttaccagaccctgcgtccccttcaacaatgattaacttgcctttttctgtccggttcttcaaatttgtttcaatcgttgcaataatcttatctttagcatctaattgttcatccgttagcttatgaaatggtgaggctttaaaaagcgccgaatcacgaatcgttctttctaacggaaagagtcttttatcaaactttcttagtttaagccagatttcggaaaaaatcttttccatttcatcatgcgaataataaagattctgttgatttgttcggcggttattgactcttttgacaacatcaacacttgccatgtattgcatcattttattttcaatatctagcgtcatcgatttattaaaatgctcatgaccaatcacatacatttcagcagtgtttgaatggtttaattcccaccaatctgctctatctttcgaatcattcgttatgtgttcgactgtccgtcgtttaatatcagttgtttcgcctacatagaccgaataattatcctgtttatcggcatccttaacaatgtatacagttggatatttcaaaatataggtttcgtcttcttcattaatttgcatttgatcaagtgctttttgattataggcagtgtcataaataattggttttaaatgggacatttaaaattcctccgacagttcaacttaactaaattatactatttatcgataaccattaaaatagcccgcctaaattgcattcacaatctagacgggctattttaattacatcatatcaaacaacgataactgattttcatcaggcaggtcattcaatacgttattttctgttaggtattcgatcagtgtcttggaaactttcccacggttggataagtcttctttagataagaatggcttttcttcgcgggcggaaacgatttgtttggcgacgttaccgcccagacttgggacggcacggaatggcgcaagcaaggtgtggtcgtcttggatcaagaagtcagatgaatctgatttttcgatgtcgaccatcttgatgttaatcccgcgttccaaacattcgttggcgatttcgagaaccgtcaacaaattcttttccttggtgctggcttccatccctttatcggtgatttccttcatgcgcgctttgacgccttctttaccttgggccatggccacgaggtcgaaatcttcggcacgcacactgaagtaagcacagtaatagataattgggaagtacaccttgaagtaggcaatccgcaacgccattagaatataggcggtcgcatgggccttggggaacatgtacttaatttttaggcaggaatcaatgtaccagtctggcacattttcgttgtcgcgcatggcttgttgccagtcatccggaatccctttacccttacgaacccgttccatgatgttaaacgacatgctatcatccataccccagtgaattaaatccatcatgatgttatcacgacaaccgataacgtcttttagggtaacaacgcctttgttaatcagttcttcggcattacccaaccaaacgtcggtcccatgcgaaaggccagaaatttgcaataattctgagaacgtcgtggggtgcgtttcttcgagcattccgcggacaaaccgcgtcccgaattctggtacaccgagcgtgcccattttcgaattaatctgttctggcgttaccccgagtgaatcagtgccggagaacaaggccatcacaccaggatcatcggttggaatcgtcttgggatcaatccccgataaatcttgcagcatccggatcatggtcggatcatcatggcccaggatatcgagttttaagatattatcatggatcgaatggaaatcaaaatgggttgtcttccaggctgcatcttgatcgtcagctgggaattggattggtgtgaaatcatagatgtccatgtaatccggcacaacaatgattccggccggatgttgaccggtcgttcgtttaacgcctgttgagcctttggcaagacgatcgacttctgcgccgcggaaagtttgttcggtatcacgttcgtaggctttgacatagccgtaggcagttttatcagcaaccgtcccgatcgtcccagcgcggaacacgttattttccccgaacaagactttggtgtagttatgcgcaaccggttggtaatcaccggagaagttcaaatcgatatcgggcactttatccccgtggaagccaaggaaggtttcaaatggaatatcatggccgtctttatcaagtggtgtcccacattcagggcagtccttatcggctaaatcgtaacccgaaccgacttcccctttggtataaaattcggagtaatgacagttgggacagcgataatgtggcggcaatggattaacttcggtaatcccggtcatcgttgcgactaaactcgagccaacggacccccgggaaccaaccaagtacccatccttaccactcttatacacaagcttttgcgaaatcaggtagataacggagaacccgttcccgatgatactcttcaattccttatcaaggcgggcctgcacgatttcagggagttcatccccgtataattcatgcgcacgattcatcgttaaggtttgaatttcatcttcggcacccgccatcttcggcgtgtacaacttatctttaaccggtgtgatttcatcaatcatatcggcgatttggttcgggttcgtcaccacgagttcttgggcaatatcggcaccaagaaaatcgaacgccgtcaacatttcatcggttgatctgaaatgaacatccggtaattgtgaccggttcagtggattggcaccacccatcgagtgaatcaaaatcttacgatagattgaatcttctggattcaaataatgtgtatccccagttgcaaccactggtttatccaattcagcacccagtttgaccatgttgcgaatgatttcttcgagtgcttgattgtcgcgaaccaattcacgttccaataatggtgcataaaccgccttgggcattacttcaaggtaatcgtaatacttcgcgcgatcacgcgcttcttggtaccctttttgcatcatcgcttcgaagacttcaccgctggcacaagcagaaccgactaagatcccttcacgtaaagcatccaagcgactctttggcaagcgtggtgtgcggtaatagtattcggtcattgaggctgaaaccagtttaaataagttcttcaacccggcttgggtctgcgccatcaaaatcgcatgcgctggccgtgcttgtttatacgcatcgccaatcccaacgcgatcattcagttgattgacgttgaccatcccatacatctcggccgcttcggcttctaatttgtataacaaataaccggttgattcagcatcggcattagcgcgatgatgatgttccaagttaattttataccgcttggttaatgtatcgagtttatgatttttgtattctggatgaagcatccgggagacttccaacgtatcgatgacgggattttcaatctgaccgagatcgttacgaccatagccagcattgataaagcccatatcaaacgtcacgttatgcccagctaagacggcgtcgcccgcgaattctttaaacagcgctaggacttcggcttctttcttagcaccgtgcaccatttcattggtgatactcgtcaattgcgttgtgaaagctgataacgggtgaccgggatcaataaattcatcgaacgagccaatcacttcgccatctttcattttgacagcggccaattcgataatcgaatcgtaaacggctgacaatccagtcgtttccacatcgaaaatcacgtattcagcatggtcgagtgcttcatcgcgcaagttatacgcgactggcgtgccatcgttgactaaattgacttcgacaccgtacaaaatcttaacgccgttcttcttccctgctgcataagcatctgggaaagcttgtaagttataatgatcggtcaccgcaatcgcggattggccccatttagcggcttgttgaacgaagtcgccaatcttgttggtcgcatccatttgtgacatattggtgtgcaaatgcagttcgacgcgcttgccattttcagcggtatcttggcgtttgggatggctaacttcgaccaaatcattggcattgaccacgagatcgcgcatgaagttatcttcttgaacactcccgcgcaccttgaaccacatgcctttatcgatggctgcgaagatactttcgtcgccgttatcccgggagaatttcttgaccgtaaatgatgatgagtaatctgtcatcttcaaaatcaagagctggcggccagaacgtaaaacgcggacttctttatcaaagacgaacccttcaatgacaacggaacgttcttcttcattgattgtaatcatctgacgggttggttcagcaggatttaagccgcggcccattgaaatcgggccatcgactggtttgccttctgattgacgtttttctttgagtgcttcatttttcttgatcgcttcggctgccgcttgtgcgcgggctgcatcttgttcagccttcttcgcttgaaaatcttcgattgccttttgtgaggcggattcgtcaatcaagggttgaatcgcaaacttgggaaaaccaagccgttgataaccagcttggattgtcgtttgcgcttgatttaagaagaacgtcttcacgatatcgttttcgacaactaaaaagacgttgcgaccgtcgatatagggggtctctttttcacacaattcgtgcaacattgaagattgaatcccactatggttaatgacgtattcccaataagctgctaaaacgccaccgtctaattcggttgcatcggtggtgatttccactgaaacacccgcaatcgctttgaatgctgcttctagatactgttcaaacgttgtgtaaacagcatatggcaaaacggattcgaaatgtaatttaaaagtccaccgtttggatgtttcgtggacaacgacttgttctacttggccagttttgaagccaggataattcgcaacatccgcgggtaaatcaatttgttctaataatttttgaaacagtgcggtttgatctaatgccacaaaagggcctcctcatattcagaaagttaaataaaaggggctaggacaaatatcattctgtctcagccctttttagatgtccgaacatttataatgtaaacgtgctttttgaaactgcctcttgcgcttaactacaatccgcgaacgatcgacgttgtcgctcattcacgaatttaagttaatgcttggagccaaacggtttcaaacgcactctattcctaaacgtgcttttcaagctaactttctgcgcttagcgctgggaatcaaattatcgactgcgtcgttaattcgcttccctgtgctaatgctcaaaagttgaccgagcttgaacgcactctattcagcttctgttgtctctgaagccaataggatacttaatgaattaatcaattcatccttcttcacttctagggtttcacccgtcttacgtaatttaacttcgacgatttcttctgctgcttttttaccaactgtgatgcggattggtaagccgattaagtcactgtcggcaaacttaacgccagcccgttctttacgatcatcaactaagactgagtaacctgcttcttcaagtaagttttcgatctgttcagctaataagacttggtcagcatctttaacattgaccggtacgacatgcaagtcataaggggcaatcgcgcttggccaaactaagccgttttcgtcagcttgttgttccgtaatcgctgataagaggcgactcacaccgattccgtaagaacccatgataattggtttcgcacggccattttcatctaagaaagtggcaccgaattgttcagtgtaacgtgtgcctagtttgaagatatgcccaatttcaatcccctttgtaaagtgcaagttcccttgaccatcaggtgatgtttcgccttcttgaacgaaacgtaggtctgaataatcagctacggtaaagtcgcgcttgctgttgacattcgtgaaatggtgatcggcttcattcgccccaaccacggcattcaccatggcttcgacactgtagtcagcaacgatttgtaagtcttctggcgcgttaactggtccgattgaacccattggtgcgttcattgttgctaagacttgttctggggttgccatttctaagaaatcagcatctaagaagttcttcaacttcacatcattaacttcaaaatcgccacgcactaagaccaagaccggttggtcgtcagcgataaagagaacactcttgatgatttgttgtgctgggacgtctaatttagcagccacttcttcaattgtgtgggcatcgccagtcgctactttttcaagctctaattgcacatcacttgagttttgcttaggacggacactcgttgccatttcaaggttggcagcataatcactttggtctgaataaacaatcgtatcttccccaatttcagcaatcgcagaaaattccattgaatccttaccacccatggcaccggcatccccaacgattgcgcggaagtctaacccacagcgttcaaaaatgttggtgtaagcttggtacatttggcggaaagttgtatccaaatcagtttcattggctgagaatgaataagcatcttgcatgatgaattcacggccgcgtaataaaccgtaacgtggacgatcttcgtcacgatacttcgtttggatttgatataacgttaatggtaattttttgtatgatttgatttcattgcgcaccaagtcagcgaaagtttcttcgtgtgttgggcctaagatgaagtcgcggccatgacggtccttgaacttgaataagttatcgccataggtttcgtaacgacctgattcttcccacaattcagcaggtaaaatccctggcatttgcatttgaacggcgtcaatcttgctcatttcatctttgatgatggcttggatgttttccaagacgcggaatgctaaaggtaagtaactgtaaacaccagcagatacttggtgaatatagccggcccgtaacatcatccgatggctcttagcctcggccgagttaggcacttcctttaaagttgggataaataattttgactgtttcataatctgttatgcctccaaaaataatctaaaagaaaaagcgttgaatatcgttccatgtaaccaagaccattaagacgaccatgatgccgaccccgacaagggtgacaatgccttctttttccggtgagatgggtttaccgcgaatcgcttcaatcacgttgatcacgagcttaccaccatcgagggctggaattggaatcaggttcataatccccaagttgacggataagaacgctaagaagtagacgagcattgtaaagccttgactcgcgaattgcgtcgtcattgaatacatgccgactggtccggctagtttattgagtgaaaaaccacccgttaagaatgacccgagaattttaaaaatctgggtcgcattcgcccatgattgggtgaagccatatttcaacttagcccccacgctatggttgagtccagctgtcacaccaatttggccgactttccccttttgcccctcgactttcaccgctttaggtgtgatttcgagtgacttagtttgctttgcccgtttaacctggacattcactggtttattcggatattttgcaatcaccgagctgaaatcagtaaacgtcgtgacttttttgccagcaactttcactaaccggtcatccattttaagcccggctttttgtgctggcgagtttggcatcactgtgccaacaatcgctttgttttgtgggacgccaccgtttaaaaaagcaaagagcgcaaacgccacaatcgcaaggataaagttgttgaacggtcctgcgaagttggtcaacatccgattgattaaactagccgactggaattgaacatccacgggtgcgatttgcacttccgttccgtctgattcaacaatcgttgcatcgtgactgaccgaataacgctttaattcggattcgtcaccactttcatagccttcaatccataattctttttgcaagtcagtttttgcaatttgaaatgggacaccgtttaacgtggttactttgtcacttgtattaattttttgaacagtttcttgttcgtctaacagcaaggttgcttgcgtgccggcttcgatttcagattcatcatccgccatccccgccatgcggacatagccgccaagtggtaaccaacgaatcgtataagtcgtgccatttttgcgcgttgcaaataatttgggtcccatgccaattgaaaattcacgcaccaaaataccagaacgtttcgccatgtaaaagtggccaaattcatgcaccactactaaaatgccaaatatgataataaacgcaataatcgccgccaatagagtacgactcccttctaaatgcgtatttcaatactctcatttgatatgaactgttatattatatcacgaattccttagaaacaagaaaagcgtttagcgcaaaccaaaaagttgcgctaaacgctagataatattgacttttaaaaacgtgctttttggttgcaacaacttccgcttaatctaaaatttcaaataatcctaaaaccgggattattcgaatttttgtattaatgctcagttgctaaccgccacaaacgcactctaaatcatgccaaacaagtgtagtagcggtaagacaaacaacatgctgtcaaagcgatctaagatgccgccgtgacctggtaagattttacctgagtctttaacgccataatagcgtttgtaagctgattcgactaaatcgcctaattgaccggcaattgagaagatcaacgttaaacctaacatgacaggcattgaataagcttgtgggaagaagtttaaataaatagctgcgaccactaatgctgataatgtcccgccaattgaaccttcccaagttttattggggctgatagctggccacattttattcttaccaaacatccgtccgaatgtgtaggcaccgatatctgtcatccagatgaccaataagatatacatcacagtgtcaaaaccaccaatatttcgcgttgcggctaaataatggaagcctaagccgatatagagactggctaaggttgtgacacccatatcatcgaagttaacccggtttttcgtgaagactgtgatggctaataaaatggcaacgaagaagtagaataaatcaaattgtgacacacctgctggtaaccagttaaaggcgcctttgggtgaggctaaacttaacaccgctagtccggcgatggttgcatcaggtgagacaataattcgtttacgcatgatgaaaacttctgataaggcaacgagtgctaaaacggctgccgcgatatcaatgtaaataccaccaaagaaaatgatggggataaagatgattaaagcaattgttgctgtaatgacacgttgtttcataattgtatttcctcctatttaagaccgccaaaacgacgattacgtttttggtaagcgccgattgagcgttcaaacactgctggggtaaagtctggccagaattcatctacgaaaacaagttcgctgtaagcaatttgccagagtaagaagttcgaaattcgctcttcgccactcgtccgaatcaataattctgggtcagcatattcccctagaaagccagtcatcaagtaatcactaatcaacgcatcgtcgattgcatcgacctcaattgtaccatttaccgcatctttagcaatctgcttaaccgcttgttggatttcgtcacgcgacccataattgagtgcaaagttcaaaatcatccctgtgttatcagccgtatcggccatcgcattgttagccgctttttgcgtcttttctggtaattcttgaatattacccatgactttcacacggacgttttcagcaatcaattccggcatgaacgtatcaaaaaaatcgaccggtaactgcatcaagaagttcacttcgtcatttggacgcttccagttttcagttgaaaaagcgtacaacgttaagactttaacacccattcgactggccgttttggtaatcgtcttaacgttttccattcctgctttatgcccagcgattcttggcattaagcgtttcttcgcccaccgaccgttaccatccatgatgatggcaacgtggttggggatattggtgggatctagttgttgtgcgtctgtttttttatttgtaaacaccacatactcctccagtttcaataactctcatatgattgtaccaaaaatcacaggaagtgactatttaaaatcaaccgattgtcaccggcattgtacaaactgaaccgcccattctgcactttttgagttcttcccagatgatttttatccacgattaagcctttaataccaacgattcccgccacaacgtactgttgccgctatcacattgaaatttattgttaaatattagtagattcctatagctattggcatgtaacaggttaaatatgataaactaatacataccttaaacagaaaaagggagtttattatgcgaaaaaccttcgaactctttcgacttgattggcgtcgaatcttaaaaagcccgatcgctcttctattaattattgccctcattatcattccatcgctctacgcgtggtttaatatctgggcgttatgggacccttatagtaaaacgcaagacttaaaagtcgctgtttactcagccgatcaaagtgttgtcattgctgacaaaaaagtcgagattggcgccgaactaattagccaattaaagaaaaacgacaaattaggctggcaatttacttcgagcaaaaaagaattagatgacggcgtaaaaacggggaaatactacgccgggatttacgtgcccaaaaacttctcaaaggatctcgttagtttcgtcgatggcaagattcaaaagccaaagatagtctactcatctaatgataagattaacgcgattgcgcctaaaattaccagtgcgggtgcaactacgcttcagtccaccatttcagaagaattcgtctcaaccgttggtaaaacattgatgagtaccctaaacaaggccgggattgatctcaatacaaatctccccgtcattaatcgtttctcgagcctcattctcaaaacagaccaacaaattccagaaattaaccaatacgcagaacaagtgcttaatctacaaaagaaactaccggaaatggaattaaagcttgcccaagccaacgagttcgcggcctttttaccacaagcaaatgccatggcgcaaaaagtagtcggcatcaatcaatacttaccacaagttgaagcagccggtcagctcgcaacgaaagttcaggctaagattccagaaatccaaagtgctggcaaacaagttgccacactcgattctgatttcgatggcatcgccaatactttaacgaacggcattaacgaagctcaaactggtttagatgtgttaaacaaaacacaaaaagtcttaccggacttaatgacttttagccaaacggcccaaggtgtcgcgggtcaattacaatcagacttaatccctaaactccaagctgctttaccggtcattcaaaaaacagtggatcaagggttagccattaccaatcaattggcaactaacatttcaactgatttaacggccgtcaatagtttgctgagtcaactcaaagaggatcccaataatgctgaactcaagcaaacgctcaaagaagcgctccagaacttatatgatcacaccgctaccttgcaaacccatgcgactcaacttgcgacaaccctccaaaacttgcaagacagctacaatcagtcagcagtggcgaatggtcaaccggaatcacatgcacttgatacaccgattaaacatttaaatacgttggcgacccaactcggcgtttttaaaggccaagttgatgaccttctcgcccattacgatgatttatcaattgacgatttgcaaaccaagattaatggtttgattcaatacgccgaccaagtcgaagacagcgtcgctaagattcaagcggcccatatcggtgacagcgtcaaaaatatgctcgaccgcttttcaacattaattgctagcggtaacgccgtcttaacacagcttaacggcgaagttttaccgaaactccccgcactcttattcaacacacaaaagacgctccaacaagccatcgactatctgcaaaaatatgctcagcagttaccagcgttgaaacaagaaattcatgacgcgaatacattattaaatggcaatctgggcacgattatctctggattaaacaccgcttctgacgtttaccagaatgattacccactactcaaaaataaactgcaactggcaaccagtttcatcaacaatgacttaccaggcatcgaaaacgacttaacaacgacgctcaacatggccaacgagaaattcccactcgttaaaaccgccttaaatgatgcgaccgacctcatcaacaatgattggccattcttacgtagcgggatccaaaaaggcgctgaggcgattcgcaaacaacaaaagacggtcgatctcaaagatctgattaaattgcttcgccgcgatgcaactaaggaaagtaatttcttagccaaaccggttgaactgaaagaaaaacacgtctacccgattaagacctatggctcagcaagtgcgccgttctacacagccctttgtctctgggttggtgcacttcttttgagtaacatcgtcttaaccaacttcgcgttagacgacaaacaaaagaatcagtacactaagaaacagcaatttattgctcgctggctaacctacatcgtcattggtgtcgcccaagccgtgattgtgacgcttggtaatattttcttattgaaggcctacatcgttgataaactaccgctaatcttattagccgtcttcctgagcatggtcttcatgacaattgtttacgttctcgccgcgatgttcgggaacgttggtaaaggaattgcgatgattgtcttggtgctttccatctctggcggtggcgggaacttcccagttgtcctctccgatcaattcttccagtttattaaccccattttaccgttcaaatacggggtcaacctcttacgcgaaccaactggtgggatttacgcaccgaacctctggcataactttatcatcctagcgctctttgcggttgttttcttcctaattggcctcttcctgaaagatcgaatcaatccattctttgaaaaactccacaaagaagcgacgaagagtaaaattattcattaacgcaaaaaaagccccgccactgttgtggcggggctttttgcatccattagggattaaccttctgtgatttctttttctttgttcttggcgatttcgtcaatcttcttcgttgcttcattcgtcaatttttgaacttgttcttctaaatcatgcatttcatcttcactaatctcgcttgctttttcagcttttttcaagctgtccattgcatcacgacgtgcatttctgatggcaactttgccgatctcagcttctttaccaacttctttagcaatttccttccgacgttcaccagttaattgtggaattactaaacggattactgagccatcgttggctggtgaaatccctaaatcagctgtataaagagctttttcgatatcttcaagcgcacccttgtcataaggggtaatcaacaagacccgtgcttctgggactgtaattgcggcgatttggttaagtggtgtcattgcaccgtaatactcaacattcacgcggttgaccaagcttgcattcgcgcgaccagcacgaatttggcctaatgttctttgtaatgaagcttctgctttttccatgcttgcttttgcttcatctaaaattggatttgccatattattctcctccttcgatcgttgtcccgatgttggcaccttcaacaacttttttgatattgtttggttcgtttaagttgaagactaccaatgggatatcattgtccattgataaagtacttgcagttgaatccatcacttgcaagcctttgttgataatatctaaatgtgttaatgtgtcgaatttaacggcacttgaatcagtgttaggatcagcagagtaaacaccatcaacgttgttcttagccatcaagatcacatctgcatcaatttcagcagctcgtaatgcagccgttgtatctgttgagaagtaagggttccctgtcccaccagcaaaaatcacaacgcggcctttttctaaatgacgaacagccttccgacggatataaggttctgcgatttgacgcatttcaattgatgtttgcacacgcgttgggacaccaatgctctctaagttatcttgtaaagctaaagcattcatgaccgttgccatcatgcccatataatcggcttgcgcacgttccatgcccatttgttcaccagtcacaccacgccagatgttcccaccgccacagacaatggcaatttgaacccctaaatcgtgaactgatttgatttcgtttgcgactactttaacaatttcagggttaattccgaaaccttggtcgccagcaagtgcttcaccactcacttttaagacgatgcgtttgtattttgtatttgacatgattgatatccctccgttgattactaggctcattttaccatatttaataagttatttgggtatgcgattctgaattatcgtaaaactgcaaaaaaaaggagcgcaaattgcgttccctttttgaagcaaaataagcttatttgatttggcccatgacttcatcaacaaagttattttcttttttctcgatcccttcaccaactgtgaaacgaacgaaacctttaacgctaccgttcttagatgcaacaaattgtgcaacagtttgatctgagtctttgatgaaagcttggtcgtttaagctgatttctgacaagaacttgttaacacgaccttcaacgatcttaggaatgatgttttctggtttgccttcgttctttgtttcttcagttaatacttcacgttcgtgatccaatgtttcagcaggaacatcttcgcgagaaacgtattgagggttaacagctgaaacgtgcattgcaacgttatgagctgcttcatcgtcagcaccttctaaagtaactaatgaagcgatttggccaccattgtgtaggtatgcgccaaagtggtcgccatcatttttttcaactaattcaaaacgacggaagctgatcttttcgccgataacagcagttaagttgattactgagctagcaattgtgccttcgcccattggtaatgcttctgcagcagccatgtcagctggtttgtttttagcgattgtttcagcaatatctttcaataaagctttgaattgatcgtttgaagcaacgaagtcagtttctgagttcacttcaacgattgcagcagtgttaccatcgatggcgatgcctgctaaaccttcagcagcaatgcggtcgctcttcttagcagcctttgccatccctttttcacgtaaagcatcgattgcttgagcaacgtcgccgttactttctacaagggcttttttagcgtccatgatcccaacgccagttttcttacgtaattccattacttgagcagctttaatttcagccataattcatacctccgacaatttatattcaatataattggtttaaaaaaagctgtcccacaagtcaggcagtatttgcgaaacctctaagacagcttatttgaatctactatttagcgtcagtgttagtatcgttgtcgccttcaactgcttcaacgatttcttccattgagtctgctgatttgttttctgcagcaaatgtagcttcttcaacatcatcttcaccttgacggccttcgatgatagcatcagccattttagctgtgattaaacgaacagcgcggatagcgtcatcgtttgatgggataataacatcaatatcatcaggatctgagttagtatcaaccatagcaacgactgggatatttaatttttgcgcttccttgatagcaatgcgttctttacgaggatcaacaacgaacattacgtctgggatgcgaggcatatcttcgataccgcctaagaatttttcaagtttttcttgttgtttcttcaacaaggcaacttctttcttaggtaaacgatcgaatgtaccatcttcgtccattgctttgatttctttaagacgtttgatccgtttttggattgtgtcccagttagtcaaagtcccacctaaccaacggtggtttacaaagtattggcctgcacgtactgattcttcagcaattgcatcttgtgcttgtttcttagtaccaacgaataagaatacaccttcgttagcagcttcttctttaacgaagtcataagcatcgtcaaccatgcgaactgtcttttgcaagtcgatgatgtagataccatttctttcagtaaagataaatttcttcatttttgggttccaacgacgtgtttggtgaccgaagtgaacacccgcttctaataattgtttcattgacaatacagccatgtcaacagacctccatatggtttttttcgaccactggtttcacttttttagagaacttgtcgccaagcacctctctagaaatcaaccagtgtgaattattttttggtattgaaataccgtttaaaagtatactaaaaataacaaggcgcgtcaacaagaacttacatgccgcccaattgtttctgataacgggttgcatcttgtggttggtggctcactgaggtaacgccactcactgtttcaaccgctcgatagcccgcttttagcgcgacttgctgactcgccacgttttcgtgtgcagcaatgatactcaactggtcaagttccaattcactggccgcgtattgttcaatggcggctagtgcgcgatgcatgacacctcgtccgcggaaagcttcatctaaccaatagccaacttcacccgcacgattcaagtcgtcaatattgtggacatcaatcgtaccaactaactggtggtcatcccaaatcgttgccatccaaagttcctggtttgccatttgttgttgcgcatattttaaaaagccaagttcatcggccactgattcgatatcgcccacccatggtaaccaagtatcgagattgacgcgattttgatccactaactgaaataacgccggcgcatccgcttccgtcacaggttgtaaatgaatgtgttgatcgacaactaacttaggttgcatattggtctctccattctaaaattgagttcttgaaatgccatgttccattaaatattgttcttttttgcggcggggttgatgtttgaacgcatactctgctttaagcgccgccgatttatcactaaacgtttcaaaatataataaccgcactggtcggcgcaattttgtgtacttcgcacctttgccagcattgtgcgtggcaacgcgtttggtaacgtcggtcgtgaaccccccataaaaactatgatcggcgcagactaatacgtaaaaataataagccttctcagtcattgtcagccatgaataacttcgtgcgcatctctggtgtatagtggctgtcttggtcataaatcgtcagttccggaagcattcgtaagcccccttttttaccatctttgaccgcttcaattaacaccatattcgcttctttgcctgctttgggataaacaaaccggacgcgtttgggttccatgcgtgcggcgcgtagttcgtcacagatttctaagaaccgttcgggacggtggactaaataccctttaccattcatctttaacaggccactcatggtttgaaccacagtgcgtaagtccgttgcaatctcatgccgcgccagtgccagatgttgattgggatttttttgactattgggttcaaccttaaaatatggtggattacaggtcacaatatcgacgctgtccttatgaatcttagtgttaacgtctttcaaatccatattgagcattgtcacctggtcggttaagtcatttaattcaattgaccgttgtgccatgtcggccaaccgttcttgaagttcaacaccgataatttgaccatttgttttgggactcatgaataatccaaccgccccattgcctgcgcacaaatcgacaatcgttccgcgttttggtaactgggcaaagtcggctaacaacaccgcatccatcgaataggaaaagacggatgggctttgaataatctgaatatctaagcgaaataattggtcaattcgctcatctgcttttaacatcgttctaccttcaacctcatttgtatttaggcatattataacaaagagtatcattatttggtataatgagcagatactagtcacgtttgaaaggaatctaaactatgtttttctcatttgcacgttttatcgtccgcattttagcctggttattgaatggcaatttgaaggtcgaaaataaagaagccctgcctgaagggacttatgttttagttggcccgcaccgaacttggtgggatccaatcttcttcgcacttgctgctagtccccgaaagttcacgttcatggctaaagaagaactctttaaaaacccaattctatgcttcatcttaacccacgcaaacgcatttcctgtgaaccgaacaaatcctggcccatcggcgattaaaacaccagtgaaagccctccgctcaaaagaactttcgttaatcatgttccccactggtagccgctattcaagcgaacttaaaggcggcgcggtcgtaattgccaagatggcgcgggtcccactcgtaccagcagtctaccaagggccattaaaattctctgatgttttaaaacggaaaaagattacgattcgttttggtgaaccaatcccaatcgatccgaaattaaaactcaacgaagagaacttagaagttgtcaatcatcaaatgcaagccgcatttgatcaaattgaccacgaaattaaccctgattttaaatatgaactacctgataaaaaataataacaaaaaactgctagatgatatcatctagcagtttttttaacgcgttaaattcttaactgtattcgtcaccaatagataggccgtaactaatgccactgcaatccagccaaattgtgttggaatcgcttggaaatcaacggcttgtctgagcggtgtcaataccagaatacctccaattaacaaactgattaaactccccaagtaaacacgccaatttgcgcgatccttgaacggtgatgctggtgtccgtaatacataaaccactagcatctgcgtcaataaaccaacgacgaaccaactcgcttggaaagccccctgttgagctgatgtttgcaggccaaatccaaaccagagaatcgcaaacgttaagatatcaaccattgagctcaacggtcctagaataaacgcactcttcagtaagcctttagttgcccactgtgttggttggcgcaattgatcttcagcaacccgatcccaaggtaaccagagttgtgcgacatcatacagtaaattctggacaagaatttgcagtgacaacattggtaaaaatggcaaacagatgctggcaaccagcacgctcaaaacatttcctagattagaagctaacgtaatccgaatgtacctatacatattgataaagactctccgtccttcaagcaccccgtgttctaaaacgttcaaatctttttccagtaggattacatcgctagcatcctttgtgaggtctgcggcattatcaactgaaatcccgacatctgcttgtttcaaagctgtcgtatcattaatgccatcgcccatgaaaccgacgacttccccttgtgcttgtaataaacggattaaacgcgctttttgaagtggagccaatctggcaaataatgcttgctcggttaatagctcactgacttgtgcatccgttaacgtctctaacatctcaccagtggtcacagctagattctgaatgcccactttttgggcaacttgctgcgtcgttaaagcactgtcacccgttaaaattttgaccgccacttgatgagcttgtagttgttgaattgccgagatagctgattgttttggtgggtccaaaaagcccaaaaagccggcgaaaatcagaccttgattaccaacgcggtcaattgatgccgtctctgctaactcatcttgataagcaaccgccagcatccgcatcccttgttgtgccaaacgatcatgcactgccactaggttctgcttttgcacttcagtcaacggctcaatctgatccgctaacctgacttgggaacacgttgctagcacttcttcaaaggccccttttggcactaattgattgcctgcatggtttttgagccagaccgttagccgccgccgctcgaaattaaatgaaatctcgcccaatttttaatatggaaagtcatcattggtttggtcttgttcatagtaatgaataatcgcctcatccagaaggttctgccagccggattgacccttggcgttcaaatatgctaatcgcaaaacttgcacatcccgctctcctaaaatatctgcatagtacatcaatttaatatgatcttccgtcaacgtccccgttttatccgtacataaaaccgacatcgccccgagattctgaatggcctttaactgctttacgatgacctgttgttgacttaaaacgacactgcctttcgccagattactattgacgatcatcggtaacatctccggtgtcaaaccaactgccactgcaatcgcaaagaaaaacgactgttgccaatctcccttagtcacaccattaatcacaaatacaaagggcaccaaaacgagcatcatgcgaattaataaccaactgatgtgttttaaccctgcatcaaattgattcggtcgcgacttaggttcagtagtcacaattgcgctaaagcaagtcgcttgacccgtggcaatcactaacgcggtagcttgcccattgacaacggtgctgcccatcagcaataaactcgccatatccgccgcattcgttacgtcagttgcttacgctgttatgcgtttgctcacgggttttgattcacccgtcaaagaagattgattaatttgtaaatcatggctcgccagaatttttaaatcaacattcaccaaatcccccgtctgcagctgcacaatatccccaggtaccagactttgtgcggcaacttcagttggttgaccctcaattacaacccggctggtctttgccaacatcgcttgtaaagcaatgctcgcttgctcggacttgcgctcttgcacgaatcgaatgctactagacacaacaatcatgattaacataactatcgcgccatcaatatctcgactgagccaggagatgatcattaagacggctaatacgccgataaacggatcttgcacgctctgccaactagctcgcaataacgaacgctgttgccgcttttgaatcgtattttccccataggtttgtaaccgtgctgttcgttgctgccgtgataaccccttcttgtcagtttcgaaatgttctaaactcgcttttggcgttaattgattaatctgattgagtgtcattttaattgtcttagccatcgtaatccctctcattcgcagctgatccgcataaaaaaggcatcctcaaagaaaggatgcctcacaagaaaaacaagccattccaatcgttgagctttagcactatatgacgtagaactttgttcagctacattagaaaaagccttcagggcagtttctgttgactcaattggcatctctcgatgtttctgagtagcagcgtttgttcatataggagcctcacctaacggattagcgatatcaatatatttatatatctatcacaccaaatcgacttcaaaatacaattaaacagacttattgaagatattcatttaaaaattgcgcaactttattacgataggttgttggatctgtagccaaggcttcaccatgagctgcccccgaaaccacccagagttgtttaggtgcatgcgccgctttgtaatttgtatacaccattttggttggtacaaatttatcttgatcgccatggatcatgaagattggcaatttcgagttagctaaactcttagcagtatcgccatcattaaagttatagccggcgcgaacccgtgccatccaattcgttgtgtaaaataacgggaatttcggcaatccaaagagatcgtttagttggtatgcgagttcgtcagcgatgctattatacccacaatcttcaatcaccgctttcacctgcttaggtaattcttcacccgcggtaaacatgacggtcgcgccacccatgctgaccccgaaaagggcaatttgactatcctgtccgttggtagcgacaatttgttgggcccacttgacgtaatccaagcgatccgtccaaccatagccaatggcatcgccttccgattcacctgctgcacggtcatccggcgcgagaacgttgtagccaagatcgtgatacatgtgaatatagcgtgccatatcctcttttttacccatatagccgtgcgcaactaaaattgttttgttcgtaggttttgttgctggcacataaattgccgccaattttaaatcatctgtggcagattgttgatgccactttgattgtttaacattttttaaccaacgttgattgtcttgatagactttcgttggcttaccaccatttaaaaatgatttttgccccggtacaaatgcgtattgatacatatacatagtggcaccaaatagtgctaccaccactaagacaacaacgctaattaacgaccatttcagccagcgtcttttcttcatgtgctaaattcctcccgatttactccgcaataataatagtcgtgtttttttgaaactgcttattcttcactgccaccattttggagttgatacatttcataataacgtcctttttgagccactaagctatcatgattaccccgttcgacaatctgcccttgatctaaaaccaagattaattcagcatcgcgaatcgtcgatagacggtgcgcgatggcaatacttgtacgtccttgacgtaaccgagcgagaccagtttgaatcatcgattccgtttccgtatcgatattagccgtcgcttcgtccaagaccaagattttaggatttgtaaccaatgttcgcgcaaacgaaattaattggcgttgtccacttgaaaattgggcgccaccttcaattacacgagcatgatattgaccagataattgttcgataaagtcatcagcttgcacgaattcagccgctgcgcgaatttgggcatctgtaatctcttgattaaataatcgaatatttgatgcgacatcaccataaaacatgaatgcatcttgtagaacaagccccatcttgcggcgcagttctgctgtctgaaaactccgaatatcatgtccgtcgattagaatctgaccttcataaaattcatagaaccgcatcatgacattaataattgaacttttcccagaaccggtatgcccaactaaggcgacagtttgtccaggttcaacaacaaatgagatgtcatgcaaaatttcatttttcccatcgtatgaaaacgaaacatgcttgaattcgacgcgaccctcagtaatttcatttgcagcatcggcattttgagctggcgcatattcttcttgatcgagaattctgaaaattcggcgaccagcgaccattccatcttgtaatgatgataaagaatccatcatattggtcatcggattaaagaagttcccaacataggttgtgaacgcataaaccaaacccgccgtgacaaagctatgcagggctgagacaccaaacaagctcaagacaacgaccaatgctagtgtatagagtaaattcacaattggtgcgagcaacaacgagttcgttcgaatcatcgcttcgcgcgtttttaaatagtccgcgttaacttgttcgaattcgtcggtcaaccgtttttcctggcggaattgttggataatcgtaatcccttcgattgattcgttgagtttcgtattcaactgactcaatttttcacgcatatgccggtaaacccgcgcactgtaactactgtaataccagataacaattaacaatattggtagaaacgctgccgttgcaagggcaatttttggtgaaattaaccacatcgcaatgaacgctgaaatgattgaaaatgaaccgactaacaaggataagaaaacattccaataatcaatcaaagtcatcgtatcattcgtgacccgcgatacaatcgagcctgctggcgtctgatcgaaataacgcatcccgagttgatggagcttctgaaataaatcgcgccggacatcttccatcgcgcgttccgaacccattccaaaaaggaaagattggaaaaattgtgtaatggctttgagaatcacgcctaaaccgtacaacgccgcaacccccattaaaacttgggtggtcgcactctgattggttaagtaacgatccataaagacttgtagtaatcgtggtaataaaatattgatggtcgctaaacctgcggcggccacaattgcgccgataaattggcgtttatagcgtttcgtataaccaaagaggcgtttcatgatgtgcaattgctctttcaatggaactttcttggaccattctgattgatattgcttggccatcttatgcacctcctaaggcttgacttaattgttgcttcaaccacatctctgcgtaccagccatctgcggcaaggagtgcttcgtgtgtcccacgttcggtgatttgaccgtcatccatgacaatgatttcatcggcgtgcatcacactactcaagcgattagcagtgataatggtggtttgatcagcccgcatcgttttcaaattcattaaaatcacttcttcagtctttgcatcaacggctgatagcgaatcatctaagatcagaatttctggatcagtcataatcgctcgcgcaatcgcaattcgttgtttttgcccaccagataacgacacaccgcgttcaccaacgaccgtttcataaccttggacaaacgttaaaatatcatcatgcaccgcactcgaaatcgcggcatcttcaaccgccgcttgatttcggtcaaaatcagcaaaccgaatattgtcgcggacatccgttgaaaataagaaattatcttgtggcacatagccgatactatcaagtaacgcatccagcgaataatcccggatatcgtgaccatcaatttgaatctcgccttgatactgatcatattcacgcaataataatttaatcagtgtggttttacccgaaccaacttttccgacaatgcccaacgttttaccttgtggcagagtgaacgccacctgtttgagcgttggttgtttttcgccagggtacgtaaatttttgaacagcataatgaatatcgccagttgctagtgtttgaatcgcatccggtgcttcgacaatggtgctggtttctttcaaaagttgatcaacccgatcataactcgcattgccccgttccaagacgttgaacaagcgcccaatcgcaaacattggccaaacaagcgccgcgatataactaatgaacgaaatcaattgaccaatcgaaatgctgtgattcataaccaacgtcccgccataaatgattgttacaatgtacgttaacccgataatcaaactgatggcgggatcaaataaaccatcaatcatattcacacgtttattaatcgcaattgtcttcgtgacaatctcgttgaaatctttaatatcagcttcttcttggccaaacgtttttaagactttaatcccagagacactctcttgggttttatcattcaaccgtgaaaaagccgcctgtgattgcccaaacgctgtgtgtaaatgtgcacctaaccgtcgtgacgcaacggccaacaagggcattggaatcaaggccatcaacgttaagcgccagtcaacgaaaatcaccatcgcaataatcgttgtcccaccagtgatgattgaatcggcaaaggttaaaataccggcaccagccacttgttgaatcgcggttaaatcattcgtggcatgtgccatcaagtcacctgtccgatgtttttggaagaaggtcgtgtccatcttcatgaaatgccagaacaatcgactccgcaatgtccgttccagtttagccgcgccaccccaaatccgggtccgccaaccatagcgaaaaatatattgtaaaatcgctgcgcttaacaagacgccgagccacatgattaatttttgggccgttaattgtttggcgtccattaaatcaaccagggtcccaatcacttttggtggcacaatttggacaatcgccacgaggactaaaaagatgacgccccataaatagcggcggtattcttgtttaaaataccaccctagttttttaaaaattcccatgttgtgctcctatcctctaaaattcgataagtcctattataacaatcttaattaagccggacaatcatttgtatttccgttcttattatgataaaaaaagagcttctaacaaacgacttgttcgttagaaacccttttaaaaccgacttgactgttttattttttgttgctacgtttttgttgtgctttcattgagctcatcatctgatttaatttcttttcagatggtttttgacccatttgcatcatcatagcctttaacatttcttcgttaattggtggattgtcttggaaatacttcttcatgtaagcacgtgcgccaaagaaaccagcgactgcgcctaataaagccccaatgacaaataataaaatgcctaatcccatatcttatgcaccccttcctaattcagttcacttaaatagtttacacataattaacctaaaaagaaagcggaattctaagattaatcgtcacgcaagcctttttcccgttggatatccttcactttttcaggagtgacttccttaccttctttgtcatacacttgtagcatctcaacttgtgagcggaaactttcgcggaaatcctttaaataggcatcgcgcagtgtttgacgttctgctgtttcagcttcagttagtccttcagcttttgctttgtgtgctaattcattaattcggtctaatcgtttttgatccattgccatcttgttgccctccaattcaaactatttgtctattttggactaaaatccgtaaaatgtcaaaaaacacgaacgcttgtttgaaatcccgctataggtatgctaacatatagctattagaacaaatgaggtgctcttatgacgagaacagaatccaagcaattagaggtcttgcgttttatccatgaccgcgttcaagataaaggttatccgccaacggttcgtgaaatttgcgaagccgttaatttatcctctacttctaccgttcatggccatttagcacgccttgagaaaaaaggctttttacaaaaagatccgactaaaccacgtgccattgaattaacagcagctggtttgacagcaattggtgcatcacagaagaagattccggttctcggtgttgttacagctggggtgcccattttagcggttgaagaagcgaccgattatttcccgattccaccaagtctacaaactgaacaagatttgttcatgttgacgattcgcggcgaaagtatgattagtgccggaattttagacggcgatgaagtgatcgttcgtaaacaagcgactgccgataacggtgacatcgtgattgcaatgactgctgaagatgaagcaacttgcaaacgattcttcaaggaacctgatcattatcggctacaaccagaaaacgatacatttgaacctattattttgaatgaagttagcatcttaggtaaggtcgttggcctataccgcgacagaatgtagctatcaaaaaaggattcgccgttatggcgaatccttttttagcatgttccttcagccaggtccttacgtttagcgactgactgacgttacattttttcttaacgtgctttctgatgcaatttcttccgtctagccacgtcccgcaaacaacccgattgcatcggttattcaccaacctaagttaatgctcagactctcccagcttagaaagacatccattaataatccattaatttgaagatatcgtagtctttaattttttcgcgaccgtttaaatcgtttagttcgattaaaaaggctgttccgacaacaatcccacctaattcttcaaccattttgatggttgcggcgattgtgccgcctgttgcgagtaaatcatctgtgaccaacactttttgaccgggtttgaccgcgtctttgtgcatgtataatgttgattcgccgtattccaagccgtaacttgctgagacggtttcgcgtggtaacttcccctttttacgggctggtgcaaaaccaacgcctaatttgtaagctactgggcagccgacgatgaatccgcgggcttcagggccaacgatcatttcgacccctttactctttgcgtattcgacgatcttgtcggttgctgctgcatatgcttcaccatcagacatcaaaggtgagatgtcacggaatgtgacaccttcttcagggaagttgggcacacttgcaacgtaatctttaaagttgattgccattttaaattcgctccttaactctttcaacagtttgctactgattgaatcctgccagccagtctttcatctccgcgaaggttgagtaaacaagctgcttttccatgtcaattttagctaatcgttgttgataacttggtgcactttctaatgcgtgcttttccggttgttccgcggccgaaatgagaccacattctattttaacaaatcctaagtcaaaaaacacctgcaacataaaaattaatagcggcaatttaatttttagataagtcgctaattcccctaaccgtgctttttcaattcctggatgttgacgtaggtaaaccaagaaagtcgcaaactgtttcttatcaggaataccatcaagatatgccgaatacttactatagaagataaagctgattttagtggcctgttgttggcgataaaaggcttcaaattcatctaaatcagttggttcatcaaccacaatcaattctgcttgctgtgcgacatcggctgctaagatggcttggctgtcggctgggatataactttgtagctgtgccagatgcttctcattgaaaaagacataggtgccactagctttaaacaactgttgcgtcaaccgattactccgttgatcgattaacacttgcccactcgtttgtaaatctttcagcatcaattgcaacgtcgtattgccgcgccaagtattctcacttagttgaccaactaatttcaactgttccaccgcttgtaaatcgtcgtacaacgcaccacggttaaatgctaagactgctaactgcgcttcttgatcaaccgccgtaaatttcaaatgcttctgatccgcaccgatctgcttcacattggtgacggatggcaccgtcatttcaatcaaaggttctgggttatccgtgccataaggagctaattgactgatggcttgataaacatcgggcgtcacatcagctaatgcgagttgtaaatcaaccgccaatgtgggtttcgttgttaaatcaatctgattatcagcggcataagtattcatcgccgtttgtaaagcagccaattgatcgactggcatcgttaagccaacagccatatgatgcccaccaaagtgcgtcaacaatgtgcgttgggcatcaagcgctttaaagagatgatatgcttcaacacttcgtcccgatcccttggcttggccagttgctagatcaattgctagcactaaagttggcttaccggtttgttcaacgatatgactcgccacaatccccagcacaccttcatgccagccttcatgtgccaacactaaggtcgcactagcttggttctcaggtgtttgtgccatttcgctagctagcgcagtaatttcttgcacaagaccctggcgctttttattttgttgttccacaaattgggcctgttccaccgcttgttcttcatcgaaagtcgttaatagattaacacctaagttggcatcacctaagcgaccaatcgcattcaaacgtggcccaatcccaaatccaatcgatgtggcgtcaagcgtttcttgttcaatacccgctgactggcaaagagccactaaaccgggacgactggtattttgtaattgttgtaagcctaagctaactaaaacgcgattttcatcagtcagtgacactaaatcacagaccgtcccaatcgccactaggtccaaactctcgtaagggatttcttccaataatgccgtagcgactttaaatgccaccccaaccccacataaatcactaaagggatactgtccctctggatgacgggggtgaatgattgctgtcgcatttggcaatgtacttggtagttcatggtgatctgtgaccactacatcgacaccgtgttcttgcgcgtaggcgattggctctaagccactcaccccgttatcaacggtcacaatcaactgggtcccattttcaacgagttgcttatagacatctaaattgggcccgtagccatctttaaaccggttgggcacatatacttccacatcggcgcctaaactttcgagcgtctcttgcatcaaagcggtacttgtaatcccatcggcatcgtaatcgccgtagactgtaattttttcgccgcccatcacagccgcttggattcgatcgactgccgtttgcatatcatacaaagcgtatggatcatgtaattgaccgacattcggatgcataaacgcactgattgcctcaggtgttttgattcctcgttgccacaacaattgggctgcggctttcgggagtgcttcaactgccattattgcttgtaagtcttggtcagttggtgttgcttttaattgccattcatattgtgcttccacattaatccctcgctacttccaaatcattaacttacccattatagcaaagattattatatttcgtttaataatccaatcaatgcttttgtttatcagtccaaatgatatactgttaattgatacacaaggttattacatagggggaaacaaccattatttggagagttgtccgagcggccgaaggagcatgattggaaatcatgtaaatgggtctaacctgtttcgagggttcgaatccctcactctccgttaaataataaatgacatggcccgttggtcaagtggttaagacaccgccctttcacggcggtatcatgggttcaaatcccgtacgggtcatttttttggaggtttagctcagttgggagagcgtctgccttacaagcagagggtcacaggttcgagccctgtaacctccattcggtcgcatggtctagctggttaggacgcctgcctgtcacgcaggagatcacgggttcgagtcccgttgtgaccgtcttaaaaaaagcgtaagcaataaattgcttacgcttttttgttgtttaatcattttaattaaagacgccagtgattaatagcaagtatccaaactcttgtaaatagcagttacgtttgattaggccgagttgtaacgcaattaataataactggccacctgcaaagagaattaaatgccaaccgtgaattaaatgcgttaaaatcactgcaataataatgcacgcccatactacataactgaggatagtaatcatccgattgtgagtcgttagttcgagaagataaatgatgattaagaataggcctaattttacgagtaaatcctcggggataaagtgaatgccactgaaaatctgagtaattaaaaagaaaaatggggctagtaagaattgaaatgataaccgtaacgtacggtctttgaactggtctgggtagataaaagggattagaacaaaaatgctagtaatccctgatagaagcccaatcaaaggtagatcacgccagccgatgattgcggctagaataattgcgactaaaagggcagcagttgcaattattcgctttggtttataccggggtgataagacgagtaaaatggctaatagcgcccctagaatcgcagttagataaaatgaaagcccgaattgctttggaaaagaccacattgtcagtccgacgattaaaccgagatttaaataattaaacaaagtcagtaattgtggccgagttgaagcctttagatgttgttggttaaggtagaacaatagcaacacttctttcttagaatatgtgtctcatcttaactttttttgaaaagaaggtcaacggcttttgaaatggattgtattttgtgctaggatagtagagttataagaagttcccgataggattcacacaccgtgaagaggccttgtaaccgacacatatatagggggaaacatagaaatgcaagaaagacatttatttacttcggaatccgtttctgaaggccatccagataagattgcggatcaaattagtgatgccatcttagatgcgatgttagcacaagatccacaagcacgagttgcttgtgaaacaaccgttacaactgggttagtcctagttgtcggcgaaatttcaacaacggcatacgttgatatccaaaaagtggtcagagagactattaaagggattggttatcgtgatgggcattatggctttgatggcgataactgtgctgtgattgttgcacttgatgaacaatcacctgatattgcacaaggggtcgacgattcagttgaatctcgtgcaaaggatgaagatccacttgataagattggtgcgggggatcaagggttaatgtttgggtttgctgtcgatcagacaccagaactaatgccgttaccaattgccctttcacaccgtttaatgcgcaaagtcgctgagttaagaaagagcgggcaactcgcttatctaagaccagatgctaaggcgcaagtcactgttgaatacgacgaaaacgaacaacctgttcgtgtcgataccgtcgttatcagtacccaacacgatgcagatgtgactttagaaaccattcaaaaggatatgcttgaacaagcgattcaaaccgttattccagccaaatacttggatgatcaaaccaagtatttcattaatccaactggtcggtttgtcatcggtggaccacaaggcgattcaggtttaactggtcgtaagatcattgttgatacttacggcggttatgcacgtcatggtggcggtgctttctcagggaaagatgctactaaggttgaccgttcagcaagttatgcagcccgttacattgctaaaaacattgtagcggctgggttagcgcgcaagtgtgaagtgcaattggcctatgcaattggtgtagcgcaacccgtttctgtttcaataaatactttcgaaacagggaccgtcagtgaagaaaagattcaaactgcaattcgtgaaaactttgatttacgaccagcagggattattcaaatgttagatctacaaagacctatatacaagcaaacagctgcatatgggcactttgggcgtacagatgtcgaatttccatgggaacgtttagataaagtggatgccttaaaggcaagtattgctaaactaaatgcctaatgtattattagacgagtaaaagaggcggcctttccttagcttatttgagttaagaaaaggctctttttatgcccaagaataagagagggagctaagaatggaacaaagtaagggaagaaaaacgaatgtattactcgtgacgattgcgattttcgtcgcaactttcatgacagccattgaagggacgattgtttcaacggcaatgccaaccatcattagtaatttacacggtatgaaattgatgaactgggtcttttcaatctacctattaacgaatgcgatgatgacgccaatctatggtaagatggcagatcggattgggcgtaaaccaatcttcatctttggtttggccttgtttgtcatcggatcatccttatgtggattgtcaaatcatatgtggacgttaattatttcccgggcaattcaaggcttgggagccggggcgattatgccggtatcatttacgattattgctgatatttatccgattgaaaaacgggcgaaagtcttgggttttaatgggtcagcatgggggattgcctccatcattgcgccgcttttagggggcttcattgttgataagttgacctggcattggattttcttcatcaatgtaccgattgggattattacgattggtttaatctggtacttccttcaagaagagaagaagacgagtgctgaaccagtcgactattggggcagtttatggttgatggcggcccttttgagtttactatatggcttccaagtcatgggtgaagccaaaccgtcagtgctcgttttagggtcaatgctcgtgattgcagtggttgctttttacctctttatccgcgttgaaaaacatgcacaagatccgattatctcattatcattatttaaaaatcgaacatttgttgtccaaaatgcagtggctgctttagtgagtggtttcttaattggttttgaagtctatatgccaatgtggatgcaagggatcctcggattgaaagcctcgatggggggctttgttgtgacgcccagttctgtgatgtggatttttgcctcattatgggcaggcctattacttgttaagcacgcatcacgaacaattctagccggtagtttgtgtattttacttgttgggagcttcatcttagcattggtcccacaaaccacaccgttttggttcttcttattagttgctgctggtttagggattggctttggcttaatcattaccacgacgactgttacggcacaaagcgttgctggtgctgacaaagttggtgttgcaacgtcgtttaatacgttaagtcgaactttaggtcaaaccttgatggtttcagtttatgggattattttgaatcggcaattggcaaaagggattgctggtgatggtcgattagatcaaaacatgttaaatgaattgattaatccagaaactgctttgaacttacctaaacaattattaccaacattacgccatattctatacaatggtttacacttcatttattttgcgtcaattgtgttaattgccattgcaattattattaatttaatggatcgtaaaagaagtaaataaaaaagattgaccaatacggtcaatcttttttattttaatggaataagacacagacgccttcaggtgtttctaagtctttttgacaggcggttaataaaccagtttgggcatcgcgccgataaagcgtaccattatcactattttggttaacggctaatagaaaatcgtcgttagcggaaagattgaagtcacgggggaattcaccatccgttgacatttgttggattgctcgtagttggcgactgtcatcactgatggcatacacaacgattgaattatacccacggttggaagcataaaggaaacgaccgtctttggaaacacggattgcagcgccgccgtttgtttcatgccaatctgcaggtaacattgagtaggtagcaaccgcgctaaaagtcccatcggctgcatgataatctaagaccgtcacttcactggacaattcacccaataggtaagctgtcttgtgattgggatggaagactaaatgccgtgtgccaaaaccaggttcactcttgtaaattgctactttggttaattgaccagcattgtcgacggcataagttactaattcatcggtgcccaaatcacagaccactaagcggtggtcaggtgttaggtcggtataatgtacgtgggcgctagcttgttcaggacgcggaccgtggccttcatgaactgtcgtgctcgctaaggttaaactgccatcggcttggatttgataaacgagtatttcgcctttatggtaattggctgcataaacgagttggcggtcttcatcgactgccacgtatgctggtggtgcgccggctgctaagaccgcgttcaaaaagacaggggtgccactagctaagtcataggcagcaatcccaccttggtccccatctttaatgacggtgtagaggatgttgcggtttgaaatcgttaaataggatgcgttatcgagattaatgaatggttggatgtcactcacggttgcagttgttgcatcgaaaattccgcggtagatccctttaccaatccggcgggtataaccaccaattaaaacttcttctgtcataatcagactcccttcgtcaaatactctttgagtatagcatattcctgcgaaaacgatttaatttgttactaaaaggattcactagtcgctaaaactaagtcgcgaatatgctacaatgatactatcttaactaagaggagatttcattatgaacacgcaagcagaagtcatttcaattggcaacgacgccattgatgatcaagaaccgatggtcattttattcgatgaacatgcgacaactgccattcaaaacgtggcattgattcaacattttatggacgaagcggccaaaaaacagctaacactgacgacagattctacggttattattaatcaacaaccttatacgattacgtatgtgggcgcgttggtaaatcctaacctcaacagtattggtcatgtcgctttagtttttggacctgcgccacaagaagatcaactgcaaagtgggctttatttaacaccagccgccgcgggtgttccggctgttcctgaattcaaagtaggaacgcagataacgtatcaagaaactatgtaggaattaggtgaattggtgtgacagagaataaacagccacaaacagaacgttcatggttctttaaatggtttttaaataagaagctaccgattgttttgttaaacatgttattaacgttgctgattatacttttattaacaaaacttgcttggctgttaaaaccaattcagtcgttgatgttgattatcgggttaccgattattattgcggccgtcttgtattacttgaccaacccgttaattgattggtttgaacggcgttggcatttaaatcgggtattgtcgattacgattatttttattttaattgttggcttactggtctggggaattgcgacgattattccaatcattcaatcccagacaacgagtttaattgatcagtggccgtcttattgggcgaatattcaaactcagacgatgaaatggtttaacgacccagccttcaaatcgattcaaaaacaattaaacgatatcaatacggatgtgtttagtaatttatcaagtaaagtaaataaaatgctgacttcgaccgttagtcatattggaacagcggtcggagtggtgacgaacgtagtcatcgcgattgtaacgatgccgttcattttattcttcatgttaaaagatggtcaccgaatgaaaggctatttgttaaaattcttcccggttaaagtacgcgccacaactgggaaagtgttggaagaaattaacacacaggtcagtcagtacatccgcggccaattgacagtagcgttttgggttgcagtcatgtttactgtaggctactggattgttgggatgaagtacgggttgacgttgggaattttagcggggattttaaacttaattccgtatttaggctctttcctagcgatggtcccgtcagtgattattgcagcgtttatctcgccgttattattgattaaagtactcatcgtgtttgctgttgaacagaccttggaaggtcgtttagtttccccattggtcttggggagcaagatggcaatgtatccggtcacgacaatcattgtgttgctggcttcaggaaagttattcggccttgccggtgtgattctcggtattccagtatatgcgattatcaagatattaattagtcacctttttgaatggttcaagtcagtttcaggcttatacgagcaataaaaaacgcacgatccgtaataaatgcggatcgtgcgttttttggtttttagagcgttaatttcatgtagtggtgggggatgcccgcttccatttcgccttcgcttgtgacaataaagcctaatttttcgtagaaaccaatggcgtggtcctgtgcgaataaaataatataaggcgttgtggtgcgtttagcgtcttcaatgatggcttcgattaattgatagccgagtccttggccacggaaagctttgatggtagcaacgcgctgaattctaaatccaccgtcttttaagacgtgcacgcgtgcggttactgctgggtcttgattgaggtaacctacatagtgaatcgtgtgatcttcgtgcgcatcgatttcctgtgtttccggcatattttgttctcggacaaacaccgttcttctaatgtatgttgcatcacgaaagataacactgttatctccaagtgtatgtttaatatccatttgtttcacacccttttctgatcaatgtagacgctaaggttaaaagcgacacgggtaattatacagttgtttcaagtcggattcaaccatttcagagaagtttttaggtacctaactaaaaagagccaaactaccgatttaaaaggtagtctggctcttttaactgctttttaaagcatgtcaccattaaaaattgaatggcgaacaagaacgtaatcgactttcttcaatgatgataagcgtttaccaccagcataagaaatcgatgattgtaagtcttggcgcatttcggtgagcgtgtcactaatcgcacctttataaggcactaaaatccgtttgccctcgacgttttggtgtgtgcctttttggaattctgaagctgacccgaaatattctttgaattgttgaccatcttcttcgactaatttgccaggtgattcagcgtgtcctgcaaagagggacccaatcattaccatgctagcgccaaaacggattgatttagcgatgtcaccgttggttcgaattcccccatcggcaataatcggcttggtagcagctttcgcgcaccatctgagggctgccagttgccaaccaccagtcccaaagccggtcttgattttggtgatgcaaactttaccagggccaatcccgactttggttgcgtctgcacctgcgcgttccaaatcgcgaacggcttcaggggtaccaacattgccggcaatgacgaaactcttaggcagtacttttttgatatgttgaatcatatcgatcacgacttgtgagtggccgtgggcgatatcgattgtaatgtattctggtagtaagttatcggttgcgagttgattaataaagtcgaattcatcgtctttaaccccgacactgattgaggcaaataagccgcgctcgtgcatcatcttgatgaatgcgggacgcttttcaggctgaaatcgatgcatgacgtagaagtaatggttttcggcaagccagatggcaagcggttcatcaataatcgtctgcatgttagcagggacgactgggattttaaacgtttctgagccaaagcggacgctagtatcaatctcgctccgacttttcacaatacatttattgggaatcagttgaacatcttcgtaatcaaatacgtccattgggaattctccttaaaaacgaacatttattttggataacacggaatttatccgtgcataacgtataataacgagcttttttatgaaagtcaaataaaaaacacattcgaacccaaagaatgggagaatgtgtttgatgatagtggccttttgtaagttaaacgggttctaatccgcaggagctggcacacgctctatttaatgtaccgcttgcgccagaagcgatagactagcacaccagaaatgatcagggaaatgaataaagtaatcaaccaacttgttttggagcgagacagtggaaggtccacgttcatcccgtaaaaactaaatactaatccggggatggtgagaataattgaataagatgccaagaacttcataacactattcatgttattattaataattgacgagtaagtatcggctgtttcgttaataattgtgttggaaatttctgccatttcgatggcttgttgattttcaatctgaatatcatcaagcaattcaatttcatcttcattaagatctaacatattggtccgcattaaactagcgagtaccattttatcggtctttaaggacatcatgaaataaactaagccgcgttgaatggtcatcagatcgaagagttcttcattctgtagggaactctgcaagcgagtttcgatttgttcacgagagcggttgatgtcccgcaaatattggagatagatggatgaaatgcggaagagaatctggaggacacttctacggtgattttgtggattgaaacctttaatttggccatcaacaaagctctgtaaaaaggtgactggcgttttgttgatggttaagacggtcgaatctgttacaataattcctaagggacttgttttatagaggtatttatctggtttttgcgggtctttttcaagaattggtatgttgaaaataatcagggtcgcattataatcaggatcgtgctcagcacgcgcactttcatcagcatctaaactatagtagataaaatcagatgggatgtggagcttcttagtgagaagctcaatttcttcagtcgagggatcagttacgttaatccaactgttggactggattttagcatgtttggtgagctttttcttagcactgtcgaagcgataggtttcgagcatggtgtcacttccttcatcaataacttactgttaagtctactggatattttaagaatgtaaagtgcggtataaaagaagtgcgttcaaaccgggtatcctttgaggattagcctaattagacgaataagcggcgtagccgattgtttggctaatgtagctaaccggaacgggatgcttttgaaagcacgttaaatcaaggagaatcagaaatttgaaaaaaattgagttagccaagcagtttttaacgacgaacttggccgtattacaatgtccaatctgtcaggacgtatttgcaagtgtagccgagcaccaattactttgtgtcaatgggcatagttttgaccttgctaaaaatggcacgttatattttttagcaaagcaaatgaagtctgaatataccaaggaaatgttgcaacatcgccgggcttttttacaagcagggttctttcagccgttcttaaaagaaattgcatcacggattacccccgatagtttagtccttgatgtcggttgtggtgaaggaacgccagtgcaacagctcaatgcgcaagtttccgcgcgttatatcgggtttgatatttctaaacctgcgattcaattggcaagtgattacaatgccgatgcgtggttttgtgcagcagacttagcgcggatgccatttgctgatcaccagttagatacggtgctcaatatcttttcgccttcgcaatatcaagaatttaaacgtgtcttgaaaccgggcggtcaactaattaaggtgattcccaatgcgggttacttacatgagttacgggagttactgtatcatggtcaagctaaggaaagctatgatcatggtccggtcttagaattgtttgcgcaacattttccagattatcaagaaatgcaagttcaaaaaacaatgacgttaacacccgagacattgcgcgatttggtcgaaatgacgccattgacgtggacggcttctaaggcacaattagcggcaatcacgttagaagcgctacctgaaatttcattagatgtcacgattttagtgggaaaatgatgagaatttaaagaaagtttaaaaatctgattgcaactctaaaataagggcgctataatgtttttaaggaattttttccctaacttttatcagaacttattttgataaaagctagtgatgaaatgacactaacgtagtttctcgccgtgaataaccgagggactacgtttttttatttgcaaagcaaggtagagcttttgtgaattctattgtataattaatctactgaatcttttttaaggaagtttagaccgtgactaatcatattgtattatacgaaccactgattcctgccaataccggtaatattgcgcggacatgtgcaggaacagatactgttttagatttaatcgaaccattaggctttgaaaccgatgataaacatttaaaacgggctggtcttgattactgggaccaagttaagattaattatcacaagaacttggatgcctttttagcaactgtgcccgatcgtcaatatttatacttgattacgaagtttgctaagcaagcttattctgatcaagatgtgtcggatacaagtgttgatcattattttatgtttggtaaggaaacgaccggattacctgaaactttcatgcgtgaaaatgaagatcggtgtttacgaatcccaatgtccgaccatattcgagcattaaacctctcgaactgtgcggcattagtgatctttgaggcattgcgccaacaagattttccaggactcgaaaagagtcatttgtacgacaatgataaattaaaatagggagtgtttttgatgcaaacgaagaaagatccaattactgttgatgcttttcattatgaccgtgtttcacctgatgtagaaccacaacaaaatatccaagtcagcttagtcaccatcagcgaagaagatccatatttacaagaagctgatttgagcgcggggaatatttaccaaattgtgacgcctttccaagttgcaccagaaaagagtggctttgcagtgtcaggtcaaatttcacaagtggttcaactcttagatttctttggtgaaccaaatgaaattgatcaaaaagacatgatgaagctttcacgaccattgattgaatacatcgaaacattgacgtatcaagtgacggcggttgctttaaatcggggcgttcaactccaatttacagcgcaagccaacgaagactaatcagcgaaaggttgcggcaattttgccgtggccttttttagtaccgtgattaaaaacggtacgggactgacatttatgggtttagtagtacagatgttcgtgtataatggatagtaggatttaaggttgaaggagattttcatggccactaaaagtaaaaaaagaaaaccagcagcacgcaaaaagaaaaaacaacaaactgatttcacagttaacatcatcgggtttatttttattttaattagtttatttgcgggtttaaagctgggctttatcggcgcgctttgcgctaacgtattccgtctgtttgttggcgatacgttcattattagtgctattttattcgcccttttgggggtctatttgttgatttatggcaagcagccccccttatggcaccaaaagacgcttggatttgcaatcgcgtatctcgggattttaatttggttgtcagcattcgtcttgcaccatcaagcggtcaataaccatttcttggccgccacatggcagcttttattggaagacttccagaagatggccgttacgacggaagttggcgggggcttaattggcgccgcgttgtatggtgttttccacttcttgttcgcgcagatggggacttatctgatagccgtcttgattgtgattatcggcgtttttgttttcttagatattccattcagcgtcgttgttcagagtacacaacggtttgtgcatgggctctttaaagctggcggctacacgaaatcagggttccaaaaggtctctgaaaaaggtaaagcgcaagtcagtgctttaaaagaacagacgcaaaaagctgttcaaaatgcaactgaacaagcagaagagacgtcagagactaaagagcaagtggtcgcaacggacggtccagaaaatgcaccgaagcaaaaattggaaccttttaaaataaacggtcccaaggatctaccaaaaccaattgcaacgcaagcagaaccaactgcacccgaaccggtggttgacgaagatgagcatgtcccagatgtggcagaactcgcaccactgaacgagacggatgatgattacgaattgccaacaccagcattattaacgcaaattccggcgtctgatcagagtgcggaatataaagccatcgagaagaatcaacaggtcttgaaacaaacatttgattcgtttggtgttgatgtgacggttaagagtgctagtctgggaccagccgtaacgaagtacgagattcaaccggcagttggggtgaaggtctctaaaattgttaacttagcggatgatttggcgcttgcattagcggcgaaggatattcggattgaagcaccaattccaggtaaaccgtatgtcgggattgaagtgccgaacacgaccgtttcgaccgtttcctttagagaaatgattgaacaagaacccccacatccaggcaaaccactcgctgtgccgttaggtaaagatatttcgggtaaggtcatcatgtcggatttagccaagatgccgcatttattaatcgccggttcaaccgggagtgggaagtccgttgcaattaacggtattatcacaagtattttaatgagtgccaaaccacacgaagttaaattgatgttaatcgatccgaagatggtcgaattaaacgtctataatggcgtgccccatctattgattcctgtcgtgacgaatgccaaaaaggctgcgaacgccttgaacaaggttgtaaaagaaatggaacgacgttatcaattatttgccgatacaggtcagcggaacatgattgaatataatcagtatattcaaggccacaacgaagacggcgaaattaaaggtgcaccactgccttatatcgttgtcatcgtggacgaattatctgatttgatgatggttgccagcaacgaagtcgaaagtgcgattattcgtttggcacaaatggctcgggcggcggggattcacatgattgtcgctacccaacgcccatctgtcgatgttattactgggttgattaaggccaatattccatcgcggatcgcgtttgctgtatccagtgggattgattcacggaccatcttagatggcagtggcgcggaaaaactgcttggccgtggtgatatgctttacatgccaatcgggatgagcaaaccattacgggtgcaaggcgccttcatttcgagtcaggatgtcgaaagtatcgtgtcgtttattaaagcacaacaaacggctgaatacgacgaagaaatgattccaaccactgagcaggaaaagcaatcaactgaagaaccagaagatgaatattaccaagaggcagtcgaattggtcgttaaacaacaaaccgctagcgtatcaatgctccaacgccgttttagagtcggctataaccgggctgcacgcttggttgatgagatggaaagccgtggtgtgattggaccatcagaaggtagtaagccacgcaaggtgttattacaaaacgtaccagaagaaccaacagaacaatagcgtgtgacataagtcaaatatcgcctaaaatggcgaataagcgcgtcagcgattgattgacattcaggattaactgaaaggcgctggctgatggaactcggttaaactattaaatgaaaaaggccgcgataaaaaatacttttgtcgcggccttttttgagttcaccttctttttttggtatgatagaatccgtgctatgaaaaaggataagttgaaaagagccattttaactgttgaaacagtgaggagtaatataacgtgaatcagaaaataacggatggcgtctacctgaatattttacaaactaaccaatttaaaacaattagattaaccgttcaattaattgcccccgtcacagctgatgggatgacccggcgttcattattagcgagcgttctaggtgctagtagccaagcctatcgtgaccaagtcgcaattgcgaacgaattacaagccatgtacggtgccggctttaatatgaatgcctatcgacaaggaaacttggcgatttttagcatctcaatgcgaattgtgagcccccaatatctacgggatacaatcgacttgcaagagcaagcgattgcgtttatcgggcaattattattgcatccagatgtggttgatggccagttcaatccggtcatttttaaccgtgaaaaagagaacttagtgcggtatatcgaaagtgttgcggatgataagcaatcatatgcggcggttgaattacgcaaactctattttaaagatgcaacgcaacaaattcccaattatggggatgcagctgatttagcaaccatcacaccggatgaactatatgcgtattatcaatcgatgattgcaaacgatcgggtccaaatgacgtttgtcggtaatatcgacgaagccaaaacggtcgcggatttggcacaattgccatttgcaccgcgtaatgttgaactgccaacgattttttatcaacaatcgttatatccacaagtgcaaactaaaacagaagtacaaacggtgcaacaaggcaagttaaacatggcctatcaaatgccagcttacttctatcaagctgattattatgccacaatggtgatgaacgccttattcggtggcacaccgctgtcgttactttttaccaatgtgcgtgaaaaagcgagtttagcctactatgcctcaagtgcaatcgatgcttttcggggtgtcattacggtacagactgggattgaaagtcgccaaaaagatcgcgtcttagagattatcgaagcccaacgtcaacggattatcgcgggtgactttgaacaggcggtctttgaacaaacgaagttggccttgattaatcaatttaaatcgagtctcgatagtgcggcctatttggggcaacaacaattcaatcgtttgtttgtacctgaaactgaaattgatgtagagcgatttacacaagccatcttggcggtttctaaacaagcggttcaagaacaagccgcaaagatgcaattgcaagccatttacttcctgaaaggggtcgatacagatgaagcttagacaaaatccccgcttaggtgaaaccctctatgaaactgaattagagaatggcttgaccgttaaaatataccctaagagcggttatcataagacatatgcaatcttaacgacgaattatggttcaatcgataagacgtttatcccagctggggaaacggattatgtgacagtgccagatgggattgcgcattttctggaacataaattatttgagaaaaaagattatgatgcgtttgaaaagtttggtcgctacggggcaagctcaaatgcgtttacgagttttacgcgaacgagttatttattttcaacaaccagtcacttgcgagaaaatttggatattctacttgattttgtgcaagaaccttatttttcaactgagacggtcgaaaaagaaaagggcatcattggccaagaaatccagatgtataatgatgaaccggattggcgcttattctatacagtgattggcaatctctatccgagtcatccagtgcggacggacattgctgggacggtggatagtattgcgcaaattacaccagaagcgctctatcaagcacatgcaacgttctatcagcctagtaatatgaacctctttatcgttgggcaaattgatgatccggatgaagtggttgattggttgaacgccaatcaagcggcaaaaacatttgcccaaccaacagaaattgtacgttcattgcctgaagaagctgaagatggtcatgatatcattccgtatcggtcacttgaaatgccaattacgcgtagcaagagcatggtcgggattaaaggtttaacggattacggaacaggtgagttagcacttgaaacaaagttgaagatgaacttgttacttgaattgctatttggtgattcatcaacgcaagtgcaaaagttgtacgatgatggcacacttgatgatagttttggttacgaatttgccattcaacggtcatttaattttgtgacccttggtggcgatgcggacaatgcccaagaattatcggatgcgattattaatatcttagaacatgccacggaaagtcctgacttttcagaggataacttggcgttggttaaaagagccgcaattggtgaatacttgcaagcgttcaattcgctagaagccattgcgaaccaatatagtgatgaattctttaccgaaatcagtccatttgatgtcttaggtttgatcgaacaagtgactttagcggacttgcaacagatggcaaccgattatttcaaaattgaaacgatgacagtctgccacatcttaccggagggagcaaaccatgcctaaatcagccttaattatcggtgcatccggtgatattgggatgacggttgcgactgaaatggcggcggacggttggtcgctttatttacactatcatcaaaatcagacgcgggttacgacgctgcaaaagcaattgttgcaagactacccaaaacaggatttttttgcgcttcaagctgatttaacccaagaggacgctgttggaaaattgacaggccagctttttcaagtcgatgcggtcatttatacagcaggtgcgacgacgtatggcttattgccagaggtcagtgcaacggtactcgatcacttatggcaggtgcacgttaaagcaccaatgctattgatgcagcagctgcaagcgaaactagcgcaaagtccattaggacgcgtcgttttaattggttcaatctatggtggccggggcagtgcaatggaagtgccatatagtacagttaaaggcgcacaatccgcctttgtgaacgcctatgcacaggaagtggcatcgcttggaatcacaattaatgtggttgcaccaggcgcagttgatacgaaaatgaacaatcagttcacaacagcagaacgggctgctgttgtagcggagatcccggccggtgcttttgcaacctcagcacagattgcctattgggtattgagtttaatggcacctgcagccgattatatgacgggacagacattgtacgttaatggtggttggttaaaataaagaaatcttaataatgcacatacgtaccaatatgctataattatggataatgatactgggataatagtgggtggaattgattatgaatgaaattggtcaaaaattacgtgaagcacgaattgaaaagggctacacactcgatgatttacaacaaatcacaaaaatccaaaaacgatatttaatcgccattgaagagggcaattttgatgccttgcctggcagtttttacgtgcgggcatttatcaagcaatacgcccaaacagtgggcttagataatgatgcattgttggcagaataccaagatgctgtaccagatacgaaaccagaagaatatgttgaaaaatccgttgaaaatcaaacccgattgacgcgcgaaacaacagattctaaatggtcgaaatggcgcaaccttgtcccacaaattacgattgtggcaattgtggtcatcattattggggtggtctatgggattgcgctcagcaaccgtggtaaagaccgcgaaacgttaaacgaaacaagctcatcggttacggtttctggggataaaccagatcctaagaaggatagcagtagtgaagacaagtctgctgaaagcagtaagaaagccgcttctgaaagtaaggcacaagaagctagcaagaaagctgctgaagataaggctaagaagcaagaattaacggcgaagatgaccagcattaatgggtcacaacaagcttttgaaattaagaacttgccagctaaagccaaccaaattacgttctcagctgataaatcagctgcttgggtcagcttaacggccaatggccaacaaatttggcaaggttctgtcgcagttggtgccgaacaaactgctgaattacctgaaggcgttacgcaatttagtattcaaactgggaatgcacctgcaacgaagatgaagattaatggcaccgatattaaccttagtccaaataacgaagcaacgtttgtgcggacgattaatttcacagcaacattggctaaataaaggacattaaggagtcttcaacatgaatttaccaaataaattaacgatgtttcggattattttgattccgatttttactttgattttagtattggatgtgcctgcgacagccattatggtcgctgggacaagtattccagtcagtgcgattattgcaacagtgattttcattgtagcctctttgacggacttactagacggcaagattgcccgatcacaacatttggtgaccaacttcggtaagtttgctgatccattggctgataaattattagtgatgacagcatttatcttcttagtggcgctagatcaagcgccagcatgggtggttgcgattattatttggcgtgaattagccgttactggcctacgtttattattaagcgaaggtggcgaagtgatggccgcagctatgccaggtaagattaagacgacgacgcagatgttagcgattattctattgctactcaacaacgtcttctttaacaatatcggcattccaatggcacagatcatgttatacgtttgcttgttctttacagtttattcgggtaccgattatttcatcaagaacagaggcgtctttaaagactcattttctaaataaacttaaactggcggggaatcccacgccagtttttttaacccaaaaagcacgaaaaaaacgcggtgattcgggtatagtagagtagcttaaaaaatatatagaacgtttgttcgatttttacttgcttttatttcgtgaaatcggtaaactaagagagtactgaaaaggactcttttgaggagggcacttaattggctaaagatgaaagacaagcagccttagatgctgcattaaagaaaattgaaaagaattttggtaagggctcaatcatgcgaatgggtgaaaaggttgatacacaagtctcaactgtttcatctggttcccttgcattggatgaagcgctcggtgtaggtgggtatccacgtggccgaatcgttgaaatttatggtcctgaaagttcaggtaaaacaaccgttgccttacatgctgttgccgaagtgcaaaagcaaggtgggactgctgcttatatcgatgctgaaaatgcaatggatcctaagtatgcaactgccctcggggttaatattgacgatttactcttgtcacaaccagatactggggaacaaggcttagaaatcgccgatgccttagtttcaagtggggctgttgatattttagttgtcgattcagtcgcagccttagtgcctcgtgctgaaatcgaaggcgaaatgggtgacgcgcatgttgggttacaagcccgcttgatgtcacaagccttacggaaattatcaggaacaatcaataaaacaaagacgattgcgttattcattaaccaaatccgtgaaaaagtcggcgtgatgttcgggaaccccgaagtcacacctggtggtcgcgcattgaaattctattcaaccgttcggcttgaagtccggcgtgctgaaaccatcaagaatgggaccgatatgatcgggaaccgtgcgcggattaaagtggttaagaataaggtggcaccaccatttaaagtggctgaagtcgacattatgtatggtcaagggatctcacaaacgggtgaactggtcgacatggcggtcgaaaaggacattattaataagagtgggtcatggtattcctatggggatgaacgcattggtcaaggacgtgagaacgcgaagaattacttggctgatcatccagaagttcaagatgaagtccggcttaaagttcgggaagcatatggtatttcggatgtcccagtagatgaaagcgatgaaacacaactcgacgtctttacggatgacgattcaaacgaataagaatcattaagctgaggcaaaagttattttgcttcagcttttttgattgcttaaccgaattattctgatggtcgatttgattgactgaactcgaaaacggttgcaatgccgatagtttaagttgacaggcggtttatgaaactataaaataactatgtgttgaaaaactaaacataataacatctttaaaaatttgcagtgaaagttgcaattcaaaatttttgatgatgcggaggtgaaacaatgaacttagcttttccattaatcctcgcagtcatcatgttaatcgttggtttactagttggttccgttctacaaaagaaggcgcacgaacgtgaaattgatggtgcaaataagactgccacaggaataatcgcagcagctgaaaaagaagccgcaacgcggaagaaagaaattcttttggaagcaagggatgaaaatcaccgctatcgttctgagattgaaaatgaattgaaagatcgacgcagtgaggtacaaaagcaagaaaaccgtttgattcaacgggaagaaacaatggatcgcaaagatgcaacgttggataaaaaagaacgttcattggagcaacgtgaaaatcgtttaacgaatcaagcacaagagctaactgaaaagcaggcagaagctgccactttagttgagcaacaaaaagcgaagttgcaagaaattgccgaattatcgcatgatgaagcgcaaaaaatcattttggatgaaacgaaacaagaccttgaacatgaacgggctgttttaatcaaagaaagtgaagaaacagctaaagaacaagctgatcggactgcgcgcacattagtcgctgaagctattcaacgcagtgcagcagatatggttgctgaaacaacagtaactgttgtgacgttaccaaatgatgatatgaagggccggattattggtcgtgaaggtcggaatatccggacattagaaacactgactgggattgacctgattatcgatgatacgccagaagcagttgtgcttagtgggtttgatccgattcgtcgcgaaattgcgcgcatgacattagagaagttaattcaagatggccggattcatccagctcggattgaagaaatggttgataagtcacgcaaggaaatggacgaacaaatcagacaaatcggtgaacaagcaatctttgatgttggtgtgcacacaatgcatcctgatttaatcaagattcttggtcgattacatttcagaacaagttacgggcaaaacgtcttgaatcattcaattgaagtggccaagttaacggggattttagccgctgaattgggtgaagatgtgacactcgctaaacgagctggcttgttacacgatatcggtaaggccctcgaccatgaagtcgatggctcccacgttgaaattggggttgaactagcaacgcgttataaggaaccggcaacggtgattaacgcaattggttcacaccatggtgatactgaagcaacatcgattatctcagtcttagtcgcagctgctgacgcgatttcagcggctcggccgggtgcacgttctgaatcacttgaaaactacattcaccgtcttgaaaaacttgaaagtattacgaatagttttaaaggtgttgatcatagttttgcgattcaagcgggtcgtgaagttcgggtgattgttaaaccagaacaagtcacagatgaccaagcaaccgtcttagcacgtgatgtgaagaatcaaattgagaaccaactcgagtatcctggccacattaaggtgactgtgattcgcgaaacaagaacggtcgaatacgcgaagtaatgcggattggcctaacattgaagcgggggacaaaaccaattttgttccccgctctttttttggttttaattaaaattgtggaggacattatcatgaaagaaggtgtgttattagttaatttggggaccccagataaaccagaagtcaaagaaattcgccattttttaaaacatttcttagctgatcagcgggtcgttgcgatgcccaaagcggtttggctccccattaaaagtgtacatgcaacagcaagttgctcaattacaagctgaattacccgattatcaagtttttgaggcgatgtcatatagtcaaccattcttaaccgatgtgcttagtgagattcaaacggcgggaatcgatgatttgacggtcgtgccaatgtatccgcaatattcaacgactacgacgatgtcggcttatgatgtagttgcgcagttttatttaaaacaatcaaacatgccaactttgcattttgtgaaggacttttatcaacgctcaggctatatcgacttgatggcaacggcgattgaacagaagctacagacgcaaacctatgacgaaattattttgtcataccatgggattccaaagtcgtacgtaacaaaaggggatccgtaccaagcacagtgtgaagcaactactgcgctattgcaggcgcgcttgcctaaacaaacttttcggaccacataccaatctaagtttggaccgaatgaatggctaacaccggccactagcactacgatgcagtcattagcccaagaaggcgttagaaaaattttggtcctaaccccgggctttgttgcggattgtttggaaactatcgaagagattgatgttgaaaatcgggactattttatggataatcaaggcgaacaatttgattacattcatccctttaatgctgatccacgatttacggccttattagcccagattgtgcgggacagataatcagggtgcttggcttttgcttaagaaatcaagtcattgttgtgtttaacgggtttgatttgtataataaagagaatgcaagagaaagtaggcaagttgaatgcaacccatgtttaaaattatagttggtctatttgcgacgatgctcgtatcggccgcaattaccccattagtgcgtcgcctcgcgtttgttttaggcgcagttgataaaccaaatgcccgccgagtgaataaaaaggcgatgccggcaatgggtggtctggccatttttatcgcgtttacgtttgggaccttcgtattattacgcgggcaattccaaacacacgaacttttcagtatcttcttagcagaatgtatcatcatcatcactgggatgatcgatgatattaaggaattgaatccaaaggaaaagatgctcggtattttattagcagcattggtcatttatttcttagcgggcgtccgcatgaatattttgacaattccatttttaggcacctttgaactaggatggttaagcttcccaatcaccattttttggattctggcaattaccaacgccgttaatctgattgatgggttggatggcttagcaactggcgtttcgattatcgcactcttcacaatgggcgtcatcgcctatttcttcttatcaatcaccaatgtcagcgtctcaatcatgattttttgtttggtcgctgcattaatcggtttcttaccacataacttccatccagcgaagattttcttgggggataccggggccttattcattggttttatgattgcggtcttatcgctcaaaggtttaaaaaacgtgacgttcattacgttattgattccagttattattctcggtgtaccaattacggatacaatttacgcaatgttgcgccgaattttgaataaaaagcccatttcacaagcagataaacatcatttacaccatcgtttgatgcaacttggtttatcacatcgccaaacggttctcgtgatttatggactggcattggtcttctcgttgatttcattgctctacccactatcgacactctggggaagcttggcattgacggtagccgtcttaattggcttagaattatttgttgaatcaattgggttacttggtgacaatcgccgcccattattgatgcttttaaaacgattattaaaaccgaagaatgaagaaaaggattagccaatggctaatccttttcttgcgttattggtagcgaatctggtgtaaatcctgtgcgctaatggggacttcgttgaattgttgagggccaaggtcgaattgtaattggccgttgaggcgttcggttaattgttgttgtaaatcactaactgctgtagtcgctaaccagacggtcatttgaatgttagtcgtatattggatgtcttcggcagtgaggtttaattggctaagtaaattttgcacagtgtcaaattgagcgtagtcaattgtaatctgacaagcggtttgttcgataccttggacaataccgaggtgttcaagtccggccgaagtggcgtgactgtatgctcgaataagaccaccagtaccaagtttgatgccaccaaaatagcgggtgacaacgacacacagattagtgagctgcatctggcgcagtacttctaacattggcacgccggctgtgccacttggctcgccatcgtcactttgtttttgaatattggccgttaaacctaattggtaggcgaaacaattatgattggccttcagatttgctttgcgaacttgtgcgatgaacgcttgtgctgcggtttcgtctgtgacacgcgcaacatgacagatgaagcgtgactttttgatttcgagttcaaattcgccgtctttttgaacggtaaaataactttgcataccggactccttgaaaaaataagctggatttaacggaactaagggtggaaggtgaaatgatggcaaaacaacttgcttatggtcgtcagtggagtgccacccaattgagtaccgttatgaataattatagtttaccacagattaaacagcgactagcgtttcaaatagttaatcagcgtctggtatgtcaacggtgtggacaagtggtgaaagagcaagctcgcttacctgatggtcggtattattgtgctgcttgcttgacctttgggcggttagtggaaggggatcagttggtttacgtgcctgaatgcaatctgtttgagtcgatcgtagaaccgctaacttggtcggggacactaaccccttttcaagcacaagccgcaaagcagattgttgcggtcattaccaagcaacaacgccatgtcttaactgcagtgaccggtgctggtaaaactgagatgttatttcaaggcattgcgacggctttagctaatgggcagcgtgtgtgtgttgctgcgccgcgggtggcggtttgtttagaactctatccgcgcttgcaagcagcgtttgctaacacaccaatcatgctgatgcatggggaacagactgcgccttaccggtatacgccgttagttgtttgtacaacccatcagttatttaagttttatcaggcatttgacactgtcattgtcgatgaggttgatgcgttcccatttgtcaataatccccagcttgagatggctgttaaacaggcgtgtaagccatgctgtgcattgatctatctgacggcgacaccaactgtaaagttgcgccatgcgattaatacaggggatttaacgggtagtgagctaccaattcgctttcatggtcacttattacctgaaccgcattgctatcccttgtttacgtggcggcgttcagttaaacggcatcagttaccatccgtgatgcgcaacttactcaggaagtgtcttcaagaacaacgcttattattatttgtgccacaggtaagggatttagaggcggttcagcagagcgttgttcgggcattgccacacattacagtgaacacggtacatgctggcgatcctaatcaattagacaagatagcggcctttagagcaggatgcggggacgtgctgattacgacgacagttctagaacgaggcgtaacgtttaaaaatattgcagtgtttgttcttggtgcagaacacgtggtcttcactgaatcagtgcttgtacagattgctggccgagccggacgacagcaagagcatgctgccaatccggtttattttttctacgcggattacacggtcgctattcagcgtgcgtgtcaacaaattaaacgacaaaatcgaaaaggacggcgattacaatccactgtttaatgtgtgcggcagttatccttgaacaaccctccattgcattgatttgttcattgcgaccagtctatccggcgatgatctgttcacgttgcatggcacagtttgaacggattgggccgcagtgttgttcgggatgtggtcggcaaatgacaacccagggggtgtgtccggattgccagagatggcagcaactgtatccaggcgaacaatttactaatcgagcgttgttaacatacaacgaaccaatgcaacagtattttcaacgctataaggggcagggggattatcgattacgtcacgtatttcaacggctgattcgagaaaattttcctgtgcaacggcaaacggcgtatatcccagtcccgactgatccaacacatttgcaaagccgcggattcaatccggtggttggcttatacgaggactgttttccactgaccccattgttgcagaagttaccaactgaaaaaggacaagcacaaaaaaatcgtgcagagcgcttagcaacgccgcaattttttaaatgcgcgcagaacgtgctgttgagttccaaggtgcagcagttaattttgttggatgatatttataccactgggcgcacgttatggcatgctcagcagtgtctccgcaagcgataccaaacgctgccaattcacgcaattactttagtccactaggaccatattatttgtgtgttacgcgcaaattatatataatgaagtcagtaacaaagcctcgggaaagaattgagttccgagcgacaagtgcccacagggggtatttgtgaaaggggagaattcatatgctaagttttaatgttcgtggtgaaaatattgaggtaactgacgcaattcggagttatgttgaaaagaaaatcagcaaactcgaaaaatatttcgatgattcagcgaccgcaactgcacacgttaatttaaaagtgtactccgataaaaccgctaaggtggaagtcaccattccattaccataccttgtattaagagcagaagaaacatcgcctgatatgtatggtagcgtcgacctagttactgataaattagaaagacaaattcgtaaatttaaaacaaagattaaccgtaaatcacgtgaacgcgggattaaaggtatggaattaacggtgccagaagcagaagcattaccagaagaatcaatgcaagtcgttcgaacaaaacgcgtttcattgaaaccaatggatagtgaagaagcaatcttacaaatgaatatgctaggccatgagttcttcatcttcgaagattcagaaacaaacggtacaagcattgtttataaacgtcaagatggtcgttacggtttgattgaaactgatgaataagtgaacgttaagttagggttgggacaacgatgagttgcgctcagccctttttttgtagccatatagataatggggttaaatttttactgaattggctggattgtttactgtgacagggttttatttgattgtaataaatggtaaaatgaattgttagtaatcatattgactatataagaaatcgctatttaagaactcaaacgtatttctagaggagaattgacgcacatggcaaactttctaaaaacatgggtagaaagcgataaacgtgaagtagcgcgaatgggcaaaattgccgatcaagttcaaagctatgaagatgaatatagtaatttatctgatgaagcgttgcaagctaagaccccagaattcaaaacaagattagcaaatggtgaaacattagacgatattttaccagaagcttttgcggttgcgcgtgaaggtgctaaacgtgttttagggttattcccgttccgtgtacaaattattggtgggattacgctacacgaaggtaacatcgctgaaatgaaaactggtgaagggaaaaccttaacggctaccatgcctgtttatttaaatgcattggctggtaaaggcgttcacgttgttaccgtcaacgaatacctttcaagtcgtgatgcaacggaaatgggtgaattatataactggctcggtctttctgttgggttaaacttaaatgctaagacaccagaagaaaaacgcgacgcatacaactcagatatcacttattcaacgaatagtgaacttgggtttgattacttgcgcgataacatggtggtttacaaagaagaaatggttcaacgaccattgaactttgccattgtcgatgaagtggattcaattttaattgatgaagcgcggacaccattgattatttctggtcaagctgaaaagtcaacagcactttatatccgtgctgatcgttttgttaaaactttaaaagaagaaactgactataagattgattggccaacaaagaccatcagtctaacagaatcagggattgaaaaagctgaggctaacttcggcttggacaatttatatgacactgaaaatacagccttgacgcatcatttggacgaatcattacgggccaactatatcatgttaaaagacattgattatgtggttcaagaaggcgaagtcctaattgttgaccaatttacaggtcgtgtgatggatggtcgtcgttattcagatggattacatcaagcgattgaagccaaagaaggcgttgaaatccaagatgaaaccaaaacaatggcgaatatcacataccaaaattattttagaatgtacaacaagttatcagggatgactgggacggcgaagaccgaagaagaagaattccgcgaaatttacaacatggaagttatctcaattccaactaaccgcccaattgcccgaatcgataaaccagatgtgctttatccaactttggaaagtaaatttaaggcggttattgaagatatcaaggaacgttatactaagggccaaccagtattggttgggaccgttgcggttgaatcttcagaattactatcgcgattactagatgaaaataacgtgccacacgctgttttgaatgctaagaatcactttaaagaagctgaaattatcatgaatgctggtcaacgtggtgcggtcactatcgctactaatatggctggtcgtgggactgatattaaattaggacctggtgtgacggatttaggcggtttggctgttattgggactgaacgtcatgaatcacgccggattgataaccaacttcgaggccgtgctggtcgtcaaggggatcctggtgtcacacaattctacatgtcattggaagatgacttgatgaaacgtttcggttcagaacggattaaagccttcctagaccggatgaagatttcagatgacgatgcggtgatccaaagtaagatgattacgcgtcaagttgaagccgcacaaaaacgggttgaagggaataactacgatacacgtaaacaaacccttcaatacgatgatgtgatgcgtgaacaacgtgaagtcatctataaacaacggatgcaggtcatcatggcggaagataatttgaaagaagttatcatgccaatgatttcaagaaccgttaaacggattgtgcaattgcatacacaaggtgaaatggggagctgggaattagaagcaatccacgcatttgccacaacttcaatggtcagtgaagaagaattaccaattgaaaaattacaaggtaagactgctgaagaaatcgaatcattattgatgacctttgcagaaaagaattacgcaacaaaacaaaaacaattagcagatgcagatcaaatgctcgaattcgaaaaagtcgttatcctccgtgtggtagatgaacgctggaccgatcatatcgatgcaatggatcaattacgcaactcaatcggattacggggctacggtcaaatgaatccattggttgaatatcaagaagaaggttaccggatgtttgaagaaatgatcagcgacatcgattacgatacaacccggctcttcatgaaggcggaaatccgtcaaaatattcgacgctaacgcgtagaaaatggctgaggtagttaacttagccattttttaatgggaaaaaatagtggagggactaaaatatggaattaagtgaagcaaaacatcttttagaagcaattgaagctaaaataacgcaatttagggggtcactttgacttagatggcctgcaagaaagcatcgcgcaaaatgaagcgcaaatggcggatcccgatttctggtcggatcaaaaagcagcccaacagttaattgatcaaaataacgccataaaggaaaaatacgactcttttatgcaacttcaagcgcaatcagaagagctacaagtgacattagagctattacaagaagaacccgatgctgaactccagacgagttttgaagctgatttgacggctgttcaagctcagatgcaacaatatgaactcggacaattactatcgggcgactacgatagcaataacgcgattgttgaattgcatcctggtgctggtggtacggaatctcaggattggggttcaatgcttttgcggatgtacttacgctgggcagatgcacacggctttaccgttgaaacagaagattaccaggccggtgaagaagctgggattaagagtgtgaccttgatgattaaagggcacaacgcgtatggcatgttacgttctgaaaaaggggtccatcggcttgtacgaatttcaccgtttgattcagctgggcgccgccacacctcgttttgttcagtcgatgtgatgccggaattggatgattcgattgatatcgaagtcctcaccgaagacttacgaattgacgtcttccgttcaagcggggctggtgggcaacatatcaataaaacatcatcagccgtgcggttaacacatttaccaactgggattgttgtttcatcacaggcgcaacggtcgcaattgcaaaaccgcgaaactgcgatgaatatgttgaaggctaaattgtatcaaaaagaacaagaagaacaggcgaaaaaagcggctgctattaagggcgaacagcttgaaattggctggggctcacagattcgctcatacgtattccatccgtacacgatggttaaagaccaccggaccgactacgaaaccggaaacgggcaagcagtcatggatggtgatttggatccatttatgtatgcctatctgcaatggcagttgagtcagaagaatcccgactagctgcaaagaaattgaaatataaatgtaatcaaattgtgattatttgaataaatagcatgctataatataaaagattgcggttttcattgacaataaataatgataacgacaaaaaaaggagtgtccccaattgattcgaatgacaaatgtgtcaaaaaagtatccaaatggcgtgacagcaattaaggatctttcgctaacgattgaacccggcgaatttgcttatattgttggtcccagtggtgctggtaaatcaacattcattaagatgttgtaccatcaattaaaagcaacgagtggtgaaatcgaagtcgctggttttgatttaatcggtatgaaggatcacgatgtcccatacttacgccgtaagatgggtgttgttttccaagatttcaagttattaccacgtttaacggtgtttgaaaacgtggcatacgccatggaagtgatcgaggcagaacctcaagcaatcaaagatcgtgtattagaagtgctcgaactagttggtttgaaaggtgaaattcgtcgctttccaaatgaactttctggtggggaacaacaacgggtcgcggttgcacgtgcgattgtgaaccggccagatgtgttgattgccgatgaaccaacggggaatctagatcctgaaacgtcagatggtattatggatattttagaagcaattaatgaacgtgggacgattgtcttaatggcaacccataacaaacaaatggtgaacgaacggacccatcgtgtcttagcgattgaagacggtcgcttagttcgtgatgaaaaagaaggtgactacggctatgaagattagaacattgaagcgtcatctcaacgatagttttaagagtttaaaacgaaatggctggatgtcaatcgcagctgttagtgcagttaccgtaacgttgttattagtcgggattttctttgcgatgatcttcaactttaacaagatttcacaagatattgaaaatgatgtgcacgtgcgggttatgattgaacggggcacaacaagtaaacaaaaagatcagctacaaaagaaacttgaaaaaatggcgtctgttaaagaagtgacgtattcaagtcgtaaaaaggaattaaacaaggttgtcggcagttacggtcaatcatttaagatgtttaccggagacgataatccgttgtacgatgtttacacagtaagtacgacaaaaccaagtcaaacgattaaagtcgctaaacaagcgaaaaaattgaaatacgtttatgatgccacttatggtgggaacaacgctaagaagttgttcaaggtaatgagtagcgtccgtaaatggggcgttggttttactttattattgctctttgtggcagtgttcttgatttccaatacaattcggattacgattttatcgcgacgcgacgaaatcggaattatgcgtttagttggggcaactaactcgtatattcgctggccattcctttttgaaggggcttgggttggattacttggggtaattattcccattattgtaatcgacttaggttatggttgggtttaccgtcatatggcactcagcatggcttcagccggttattcaatgttgaaaccaggaattttcttattccaacttgatttaacaatggctgtgattgggattgtgattggggcattaggttctgtcatctcaatgcgtcgtttccttaaaatttaaactaaattagtgaaagagtgacgaacattaaattgttcgtcactctttttttttgaaccctaggcagttaagggggcaaaatgctatactgattgggataactgcgaaattcggcagctggaaatcgagcgtgtgtcgttggaaacacgcacggtatttaaatatagacgctgggggtttgttgaattgacgatgatcattgatattttgcgaccattactaacggcaccacttttatggttagcgattgtgtatgctggctggttagcgcatagacgaattagcttggaacggaagacctttagaattgcgattaatccacgatggatagaagtgggccattttgtgggccatgggctactcgcagggctagccttaagttgctgtaccttagtgttaggggcgatggttaatatgcaatggtggctggtctatcaactaatcgctattttgagtttgctagtggctgctagatggcaaaacgtatcggcaacctttttaatcagtgctttggtctacgctggtgcaacattcatatggccccaatatcagatggaaggtcaagcaagtcttttggctgaattattggtgattattgggttagtgaccgtcatcaatagtgttttacaacgttgggatgccgaggcaactgtgacaccgcgtgtgatgactagcaagcgagggcggttgacggccttctttatgagtcgacaaatttatattgcgccggtctttttcttagtgccaggggcaattgatatgccaagtttgggtttttggccggtcttaaatatcgggcatcaatcatatagcttggtaatcttgccattgttattgggatttagtttgaaagcagtcaaaggcttaatgaaatcagttgttactaaaaatgccaatagctatttgatctttggcttgttgttagttgggtttgggttaattgccgttgcatttccgaactggattattggcatgttaacagttgcgctagtactaagctgtgcattacaatggcggttgagtagacgcagtgcccatgaacggcagttgcactttacgaaaccctacgatggcgtctttatcttagggattttacgcgaaacgccggctgctaaaatggggttggtcgttggcgatacaattgttgaatgtaatggcgaggctgtctcaaataacgataatttttatcgggcgattcaaagtcagccaacgtattgccatttaaaggttcaagatttaaacggtgagttccggatggctgaaggcgcaatttttgctgatgcaccacatgagttaggcgttgtattattcccagagaattaagtaaataaagggtggcatgaatgaagacaattttagtggtagacgatgaaccagcaatcttgacattattacgctataacctggaacaagaacattttaaagtgatgacggcaactgacggtgcacaagcgctgacgatggctttacagcagtcgtttgattttattattttagatttaatgttgcctaagctagacggaattaccgttaccaagaagattcgggaggcaaagttaaaaacgccgattatgattctaacggctaaggatagcgaaaccgataaaattgtcggcctcgaagtgggggcagacgactatgtcactaaaccatttagtccacgcgaaattatcgcgcggattcgggcaattgaacggcggacggcacagcctgtagcagtcgttgaaacgcaccctagtgatattttacaagtaggggacttaatggtcgatgaaggcgaagttgtggctaaaaagggcactcagaagctccatttaacgcctaaggagttcgaactccttgtttactttatgcatcggattaacaaggttcaaagccgtgagaaactcttaaatgcggtgtggggctttgattatccagccgaaacgcgaatggttgatattcaagtcagtcatttacgggaaaaaatcgaaacagatccgcgtcatccagtttacttaaaaacggtgcgtggtttcggttatcaattggaggaccccgaccatgaccaaacatgatcaatttagattttatcagctagccactattttagtggctgtttacataggttttattgtgcttgtcaatttggtgattgcccaacaacaagacgcgatgttaaaggaacggggcgccgactatgcgctaatcatcaaacaaccacagtttgatcggcaaaagtggttacgccaaaacggcttacaagttttgacgccaaaatcgccgaataaaacaaagttgcaaaaagcagtgacggatattgtcaatcggaatcattctgccgccaattttagtacgcggcaaacagttaataagcaaccgtatttgttttacgcacaccaagcagatcggcccaactttgtcttagtagtgcctcagcaacagttctggcatacgtggccgaagattgctttatcggtcacgattgtctatttaatcggtagctggatttttctataccgtttctggcggcaacgccgtcatttctttgaccacttgaaaattttagtcgctaatattcatcatattcggcatgaagaagtgcccgaaccgattatttttcaaaaagatgcgtcattatatatcctcgcgcaagaaattaataaattaaatggtgatatgcggcatatgcggcagaagattgccatgcaacagggcagttttgaccgcctaattgaccatttaccggtcggcgtcatggtgattaacgaaaatcgtgaagtcgttttgcacaatgaagcaatggatcggttattggagacgacgattgttactgagaaacacccctatattgatgatatcaagacgtatgaattaacacggatgattgagcacacttttaggtaccgaaagagtcatcaccaagaaattcagttgattcaaaatcaagaacggtttgtggatgcgaatgttgtccaactcaatacggttaaatcgaaattccaagcattagtcattttatatgatttaaccgatgtccggcgcgttgagcagatgcagttggattttgtcagcaatgtgagtcatgaattgaagacgccggtgacggctattacaggctttgctgagacgttgttagctggtgcggcggaagatcctgccacgcaaaagcaattcttacaaatcatctatgacgaaagtacgcgattaactgcgctgattcaagatattttggcgctttcgcatctagatcgtaaggaccaatcgcaagagcaacttgtgaatgtacgtgaattggtgcaggctaatctcgaactgatgcaacaaaaggcacaacaaaagcagttacacgtctccgttgatattccaacggatttagcgattagaattcagaaaatgaagtttaatcaaatcttgaaaaacctaatcgctaacgccatcacgtataataaacaaaacggctcgttggtgattgccgtgcaacttgaaaaagatcaaattgttatccgcgttgtcgataccggtttgggcattccaagtgacctacaagaaagaatttttgaacgattctatcgggttgatcaagcgcgcgcgacccataagagcgggaccggccttggactagcaattgctagcgagattaccgccagtttagaggggcagttgaccgtaaagagtcaattaggtgtcggtagtgaattcattttgaagctaccaaacgcttgatttacacaaaatttacatttgataggcttagtttttacaaaccttttttataatggaacttacgaggtttaaatggaattcgtggaggattaacatgcgcaaacgtaatgttattggcttattagtcacattcagtttattactattggctggttgccagtctaaacaaaatggtcagtccgtaacggcggtcggctcatcagcccttcagccgctgattgaagcgttagctgaacaatacagtgctgatcacagcggtcagttcattaacgtccaggggggcggttctgggactggcttgagtcagattcaatctggcgctgtacagatggggaattctgatttatttgctgaagaaaaggctggcattaaagcggacaagctggtcgatcatcgcgtggctgttgtcggcattaccccagtcattaataagcaattagggattaaaaacttaacattgacgcaactcgcgaagatttttagtggcgaaattgataactggcaagacgttggtggaccagatcagccggttgttttagtaaaccgagcccaaggtagtgggacgcggacgacgtttgaacaatgggtgatgaagtcgcgcaagactaaacccgctcaagaacaagattcaacggggatggtgcgatcaattgtagcgaacacgccaggggccatcagttatcttgctttttcatacgtagatgattcgattgcaatggttaaattaaacggcattgcaccaaccgatgaaaacgtgatgactaatgcatggccaatctggtcatatgaacatgtttacaccaaggggcaaccaactgggttaacaaaacgtttcttggcgtatgtcttatcagatgaggttcaacataaacaagtcggcaagatgggctatattccagttgctaagatgacggttgaacggtcggttgatggcacaattacaaaggttaagtagggggccaattatggatccaattaaagcaagtttacttaagaaatcacgcgcagccaaaagtgaaacacggggcaaattaatcagtttattctgtattagtttaatcgtgttcatcgtgctcgccattttctacttcgtcgcttcaaaagggttagcgaccttctttaaagataaaatcaatctaggccgctttttaacgcagtctaattggaatccaagtttgaaagatagtcatggtcgaccagaagtgggcgccttaccaatgattatggggtcatttggagtgactttcttagcggctttattagcaacaccgtttgcaattggcgctgggatttttatgactgaaatctcacctaagcggggtgaaaaattattgcaaccagtgatggaattgctcgttgggattccatcagttgtttacgggtttatcggattatccgtgattgtaccagctgtccgtcatttgtttggtggcagtggctttgggattcttgccgggacttgtgttttgttcgtcatgattctaccaactgtgacatcgatgacagtcgatgcactcaagagtgtgccacggcattatcgcgaagcctcactcgctttaggtgcaacgcgttggcaaacaacatggaaagtcgttttaaaagcagccacaccagggattttaaccggggttgttttcgggatggcccgggcgtttggtgaagcattggccgtccaaatggtcatcgggaacgctgcgttattaccacataacttaattaccccagcctcaacgttaacgagtgtgttaacgatgggcattgggaatacggtcatgggttcattagccaataatgcactttggtcattggcgttactcttattattgatgtcactactatttaacttattagttcgtttaattggtcggaagggagcaatgggtcgctaatggatgcaaaaaaatgggataaagttgccaccggtgtgctaaccctcatcgctggtttgatcgtattattattagcaagtttgctcggctatatcttggtgcgcggattaccacacgtgacgtggcagtttttaacgaaacctgcgcaaacctttactaaaggtggcgggattggcgtccaactgtttaattcattctatctattaattttggcgatggtgatttcagtaccgttatcaattggtgccggcatctatctcgcagaatatgcgccgaagaactgggtgacgaatgttgttcggaccgcgattgaagtgttaagttccttaccatccgtcgtggtcgggttattcggtttcttggtctttgttatccagtttaagctaggcttttcaatcttagcgggtgctttagccttgaccgttttcaatttaccgttgttaacgcggaatgtggaagatgctttaaaatcaattcacttcacacaacgtgaagcaggtcttgcacttggtttatcgcgttatgaaacggttaagcatgtcgtgattccagaagcgttacccaacattattaccgggatgattttaggcgctggccgggtctttggtgaagcggctgccttgatttatacagctggacaaagtgccccatcacttgattttaccaactggaacccaatgtacatcgcgagtccgttgaatccattgcgacctgcggaaacattagcggtgcacatttggaagattaactcggaagggattatgccggatgcgactgcggtttctgctggcgcatctgccgtcttaatcatcgccgttttactatttaactggttagcacgggtcatcggcaagcgtgtctaccgtaaaatgacagcagcataggagaaaataatggcagattacgatttaacaaaaacgcacatcaaacatttagatgaaccaaaacatgaaattgccttatcaactgaagatttaaacgtctattacggcgacaaacgcgcgatgcacgatgcatcattgcaatttgaacgctatcgaattaccgcgttaatcggcgcttctggttcaggaaagtcaacctatcttcggagtttaaaccggatgaatgacaatattgctaatacacgtgtgaccggtaagattatgtaccggggcttgaacatcaatagcgatgacgttgatgtgtataagatgcgggaacatatcggcatggtgttccaacggcctaatccatttgccaaatcaatctatgacaacatcacttttgccttgaaacaacatggacaaaaagacaaaaagtatctggatgaagtggttgaaacgtcactaaaacaagctgctttgtgggatcaagtcaaagattcattaggaaagagcgcattggcactatctggtgggcaacaacaacggttatgtattgcccgggcaattgcgatgaaacccgatattttattattggacgaaccggcttcagctcttgatccaatttcaacgaacacggttgaagaaacattgattcgcttaaaagaagaatttacaatcatcattgtgacgcataacatgcaacaagcagcacgaatcagtgattacacggcctttttccattcagggcacgcacttgaattcgacgaaacacgtaaaatgtttacccggccgaagattaaagcggccgaagattatgtttctggtcactttggctaggacgcaaggaggtttgccccgtggcaaataagattattgaatcctcagatgtgcatctattctatggtaagaatgaggccttaaaagggattaatatggattttgttgaaaatgaaattacggcgctcatcgggccatctggttgtgggaaatcaacctacttgcgctgcttgaatcgaatgaatgatttaatcgactcggcgaaggtgaccggtaaattcttattgaatggccaagatatttatgcgcctgagatggataccgttaagttacggaaagaagttggcatggtgttccaacaaccgaacccatttccattttcaatctatgacaatgttgtttacggcttacgtttatccggtgttaaagatcatcgcgtcttagatgaagccgttgaaagtagtttgaaacaagcggccgtttgggacgacgtcaaagataagttacacgaaagtgctttatcactttctggtggtcaacaacagcgggtttgtatcgctcgggtgttagctgtgaaaccgaaagtgatcttaatggatgaaccgacttctgcgctagaccctatttcgagtgctaaaattgaaaatatgttgctagaattgcgccaacagtataccattataatggtgacgcataatatgcatcaggcttctcgtatttcggataagacagcattctttttacaaggtgaattgattgaatacgcaccaacgaagaagattttcttaaacccaaccgaaaaagaaacggaagattacatcagtggccgttttggctaagaaagaagggaaaccacaatgagacgactttttgaagatgagttaaatgatttacacgttcgcttctccgaaatggggatgatggtcaacgaagccatctataaatctgttaaagccttcattaatcacgataagcaactcgcacgcgaggtgattgctgacgatcataagattaatgaacgggaaacggatttggaacgtaagagttttgagttaatcgcacttcaacaaccggtctcaactgaccttcgcgtgattgtcacaatcatgaaggctagttcagatttagaacggatgggtgaccacgccgtttcaatcgcgaaatcaacgattcgggtcaagggtaatacccgtgtccctgatatcgaaaaagatattgcggatatggcagacaaagttaaacaaatggttgaagaggtattggacgcttacgtcaaagaagatcgtaagaaggccatcaaaattgccgatgaagatgttgcaatcaatgcttattcagacaatatttatgacgactgtatcaaagaaatgcaacgtgattcagaaaccgtcgttgggagcatggactacatgttagttgcaagctacctcgaacggattggcgattacgtgacaaacatctgtgaatggattgtctacctcagaaccggtaaggtagtggaattaaactccaatgcacaagaagatgaattctaaacaattcaattaaaaattttaaaaagcgatgacaaggtcgacttgctcgtcgcttttttagtgggagaatcataatgcaaaaacaaatatacttagctggcggttggtttacacctaaacaggcctcattagtggaacgcgcacacgcggctttaaaacaaaacccaacgattggttatattcatagtccacaggagcatcaatacaagggtgtgacagaagatcatgatccagaaggcatgttcgggggttacgaatgggccaaccaaacgtatcaaaacgacatcacagcaatggatttagcagacatggcagttgtgttatgggatatgcaagacgaagatacgggaacggcgtttgaagtcggctacttgaatgcctgtcataaaccaatcgtctttgtttgtgaagatgatttacaagtcaatcccatcaacctaatgttggctaaagggattacccaatgtctaaccagtgtggatgaattagcaacctttgatttccaatttgtcgccggcgaaccttacacaggacaaatcgtttaagcaaaaaagcgcaggacaaaaataattttgtcctgcgctttttttgttctcactcttgatacctaaataaaaatcaacctttggacctatgacaatcgactgtaaaatcggcataatagagtcatagtcaagtgaaacagtacaacgaatgatcaatggaggtcaaaacaatgaatgaacgtcaacgaattttagacttagtgaaccaaggtattttaacttcagaagaagcattagtcttattagaaaatttagccaaaaatgaccaagatgtaaaatcaaatccaactgaaacagcaacggagcaaactgaacaaccaaccgctgataaaagcgcaattgaagaaaagacacacgaattaaccgttaacctttccggcgttaaccggcagttgcaagatttgaagcaagcaatgcacgctgatcaagaacaagtcactgtccttgatacgatggaagatttagatagtttaagcagtgaaaaagcaaccgaacggcaaacactcaaggctggcttattacaaaagcaagctgaagtcgacgagttggaagccaaacgcgaagcactgacggatgaactcaaccaaatcgaaaaagaacgccgccaaatgaccaaaaatcaatggtcagaaaaattaggtttatcagatgactggaaagaaaatgccagtgaaacatttgatgaattgagcgataagttaggcgaagctagcacacactttggtaagttcgtgaagaatactgccaaaacagtcatggataatgtggattggaaagaagtaaactttaaggtgcctggtttggcaactgaaaagttcagccatgaattcgtttattctgacgtaacaccagaaatgattaacgtcaaagtggctaacggtagtgtacatttccaaatctgggatcgtccagaagtcaaagtcgcagcgcaagtgaagttatatggtaaaatggcagaagcaacaccattggctgcttttgaagcgcgcagtacaattgatgtgactgatgccgacttggtcttccaagtgccgaataaacggattcaagcggacttaacgttctacttaccagccaataactacttacaaacgaatgtgaagttattgaacggggatgttgaattagatggctttaccggccgggatatttacttgaagacgactaacggtgaattaacgttaatcagcaccaacgctgcaatggtggaagctgaaaacgtcaacggtggcattacctttgatcaaggccgttacgatgatttactcgcaacaaccgtcaacggtaacctattgattcaagcgcaagttttaaatgcgagtgtttcaacggtcaacggggatatcaagaacactttgacgacaactgatttacaacatctaaaagcaaaatctgtgaatggcacaatcaagacagctttaccacaaactttggcaatgactgttgatgcccgcacgcgttttgggatgattaaaaatcggcttgcaaacacccaaaccatcgaacaacggcaaagtacggggaatcaaatgttacaacttggccgtaacgacaatgaacaggcagctcgtttaacattaagcacgacaactggtaatattttattgaaagacaacgataactaaaaaattaaggaatggtgggttttaacaatggggaaaagactttataaatcaagagataacaaaatgatttctggtgtaatgggcgggattgctgagtattttaatattgatgcgacattagttcgaattctatatgttgtattctcaatgttttcagcagcgttccctgggattgtggtctacatcatcttagtgatggtgattccagaacggccacgtcagagtaaacatgattctgaaagtgaatggagtgagttttaatgccttttttaatgattttattagtcattatcgccattatggcggcagttggcgtgtttagtctcgtgattggctcgctactgttattattaaaatttgcgctaccactgattgtgattgggttaattgtcagcttcatctaccgggcaattgctggcccaagtagacgtccacggcatgcagactggtgccatgactaccaagactattcttatcaagaaacagcacatcaaggtagccgtcaacgcaaggaagcccgtgatgtcaaagtagacgatgatgactggagtgatttctaatgcggtattggacacgcgtaattgttgatactttgttattcattgcgatttctggcttattgcccaatttattctatgttgaaaacatttggatcgcgttagtcgccagcattgtgttatcgattttaaacatctttattaaaccattgttgaacttactctcatttccaattacgtttttaacattcggtttgtttagtgtcgtgattaacgggattatgttagaattgaccgctgttttcgtcggcgcccactttagctttacaagttttggagcagccgtgatcgtggctatcattttatcaattgccaatacgattattacaaatcaatttgtgagagagcgttattaaaaagttagcgggactgacgtcaatgaagtgaaccccaaatattggacgaaactttaagcagctttctggtcagattaaatctgacggttctttttttacataattggggcaaacaaacgcgctaagttctgtgaccaacgttcttgattgctttgctcttgtatccgttgtttcgtaaatggtaagcattcttttaaatcagccgtaaaagattgttcaagttcagttgcgagttgtgcatcatataaaaaagcggtcgtttcaaaattcaatctaaaactgcgaatatctaaattagccgtcccaaccgctgctagttgcccatcaactaacattacgcgtgatttaaatccggttgattcagagaagtaaatctgaccgcccgccttcacgatttgtctagcgtaatacaaactcgcatgatgaatcattttatgttttgcacgtttggccatcatgatcttcacagtcaccccagaattaatggctaacactaacgccgccaatacagaatcatccggaataaaatatggggtctgaatccacagccgttttttagcggcagcaatcatcttcaaaaagcctaacttaatctcatcgagttctcgatcaggtccacttgataccagttgcatgctagtctgcccgtgttcatctgagttaggaaaatattgcggactgtaatacaccttttcctgacgcgtagccgcattccagtccatgaaaaagcgagcttgaaacgataacacaccatcgccggtaatccgaatccgcatatctcgtgcaggaatattaacgtgatgattattctggttaaaatcgccaaggtaggcggtattgccatcaattactgccaattgccggtggttacgaaagttaaagcgtagattaacgaaccggaaccgagaactaaaaaacgggacaacttggccgccggctgcttccaatggcttaaagaactgccgggataaatgttgcgacccaaatgcatcatacatcacacgcacttttaccccccgcagtgccttgtaagccaatagattgaccagttgacgcccgtgttcgttgtcataaaaagcatagtattcaagatggatatgatcttgcgcccgattgacatccgttaacaactgttgatacgccgccttcaaatccgttaaaattgttacattgttttcctgggtcacaaccgcggtatttgatactaagaagaggttgattaagctctgcgtttctggcggtaacgtgtgttgcttctgcgcttggcgtaacgctgctttttgggaggtcaccaaggcatcaatgccgagccgttcttgtgtttttaaatcgaccatatgatcttccggtaatttttttccgaaaaatagatacaaaacaaagccgataattggtaagaaaatcaataccaagagccaggcccaggttgctgcaatatcacgttgttggcgaaatacggtgataacagccccgattgtatttgcaatccaaatcagtgctatcccccagataatgattgctgtcattcttcattcatcctattctttaaaccactttgcttttaatttggctagcgtaccatttgcttgtaagacccgataacgtcggttgataaattgacgtaattgttgatcttgcggacgcatcccaacagcaaactgttctgctgcaaaaggactgtcgatggcttgaaaatcgctgccgttgtggcgtgacttaatttcaaattgcgcgtagacttcatcaattaagagccccttaatccgatcggcctgtaagtcgataaacgcattgttataagtatcatataggattggtgcatggttggcaattctttgctgtaatcgtttaggataacgctctagttgttccatcccagatgagcccgtttgaacgcctaatggttggttggttaaatcagccatttgattaacagggtgtttcttgagcgacacaatcatttgccgattagtcagatacgggtcactaaacgcaacccgttttgcccgttgcgccgttttagaataaccactccaaattaaatcaatcgtttgattattcaattccgtttctttcatatcccaatcaatcgactgaaagtcaacccgaatgccactccccttaaaaatcgcccgtgccaaatcaacatcaaaaccggttaattgaccattcttctcacggtaagtcattggcacaaaactatcatcaatcccgacgactattttttggcgtttttgaatcgttgcccattgatcagcctgctgattgcgttgtgcgcaccctgctaaaccaatcatgctcatcaataaagccgctattaatgctgtttttttaagcttcatcattttgttgaaccccgtttggttgtaattcaaagatttgatcagcaatctggttggcaaattgaatatcatgggtgacaacaatttgtgtcattccctgctgtttcaaatctaaaatgagttgtgcgacacttgccactaacgatggatcaagtgcgctggttggttcgtcataacagagaatctccggttgcatcgccaatgcgcgggcaattgcgactcgttgacgttgaccgcctgatagttggaacggataagccgtcgcctgagcacttaaccctagttgctgtaataattttgcgccatctgctttagcctttttagcgggttgttttttgaccatgatgggtgccagcgtcacattctcaaggacagaaagatgtgggaataaccgaaaatcttggaagacaacgccaatgcgcgccccttgttcccgattactaggttcgtaaggtttaccatcaataataaaccgtccgctatcgggttgatcaagcccactcattaaccgtaataaagttgatttgccagcaccacttggaccgacaatcgctaaaatactccctgattcaactgataaatttaagtcgttcaaaatttgccgacctttgaaggattgattgatattttctaattgaaacatgttgccgcctccttagcgataataacgataatagcgttccaaacgccgtaatgcccatgtacaaatggctgttaacaataaataaataatcccgactagcaaaagtggtaagagattgacatcacgcgcacttgcgacattgccagcccgcagtaaatccccaatgccgataacatacactaacgatgaatctttaatcaagttgatcacttcgttaccgacagacggtaagacaattttaaccgtttggggcacgataattttagcgattgtttgtgggtaagttaagcctaagacctcagctgcttcgatctgaccattatcaacggcttgaaagccgccccggaaaatttcggcaaaatacgcagcataattcaaaataaaagcgattaaagcagcatcgaaccggttaaaaacaattccgaccacgggtaaaccataaaatacaaaaattagttgtaataataacggtgtcccacgcatcagccacacatataaatctaaaagataatgcagtggtttaaacttagctaataaccctaaacttaataataaaccaagtggaatcgcgccaataatcgttaggccaaaaacagccaacgtcatctgcgccccacttaataatgctggtaaaatcgataaactatagtcaatcatgacagactcctctcatttgtccaaaataaaaagccctctttgcgtttaaaacacaaagagggctaaatttcgcggtgccacctcaaatttttgtttgcctcacaacaaacaactcagttagttttagaccaataaaaaaagtcccctggatttctccaagaggacgaatttatcgcggtgccacctcagtttaataaactgctcacgcagcttaaacttatgtagtttctaaaactacagcgataacgggctaacggatcatctttattcgatgatcaaactcacggttgtgccattaatctcaagggccgacttccaccacgcatcagctctctgaacctcaagaattaatttggaccgttcaacgtttaatgtattgttattcattctattcaatattgcatcaaaagtcaatggttaatgtttattgcttaccgaaaagacgggcccagaaaccaaccttgtgttgtttcaaagtcatcaatggaactgtttcgcctagtaaacgacgggcaatattccgatagccttggcttgctgggtttttcggatccatcacaattggttcgccggcattggacgtcttgataaccgcatcatcatcaaaaataatgcctaacaatgaaattgaaagatgtttggtaatttcatcaacatccatcgtttcgccttcattcatcatatgacgccgaatccggttaattactaagcgtggcgcaatccgcatttcttcttcttctagcaagccgacaacgcggtcagcatcactaacagaagaaatttcgggagttgcaaccacaattgcaccgtctgcaccggcaatcgcatttttaaagccagattcaatcccagcaggacaatcaagaatcacaaaatcgaattcttcttttaattcattcacgatggcggtgacttcatcaggcgttaacgcttctttatccgcattttgagcggctggcaataagtaaattttttcatcaaaacgtttatctttaatcagtgcttggtgcaacttagcacggccttgggcgacatccacgatatcataaataatgcggttgctcaatcctaagacaacatctaaattacgcagaccaatgtctaaatctaacaagcaaaccttcttatctaaaagcgcaagcgccgtcccaatattggcgcttgatgttgttttaccaacgccgcctttaccggatgtaataaccaaagctgttcccatttttattgctccttcattttacgatataattttggattaatctgtttcaaatccgttaactcaccgtagtcgataacatgtaaatcattgatgaaacttacactctgtgccgtaaatggcgtcttcttgtgatcgagaatctcaactgcgtctgctatccgcaattgtaacgcgtgtgataaatcacctgcaacaactgcttctgcattatctggaaacccagcgtgcacaatcccggcaacttcaccaagtacgaagatactgcccgttgcttttaacgttgcgccttggtgtaaattaccgacgaataagacatcgccaacataattgacctcttggccgcttcgtaaaacattgggttcaacgtgaatactattttcccgccgatcaatctcagcctgttcaatcgtcatgacttccgattgaatgcttgtcccattaaattctggaaactgctcaaagacggtcgccagtgcttgcttttgcgcatcattcaacaagcgtctaccagtggtcagctccagttcaatctgatcgctccccaactgcggttgctctaagcgaatcttattcaataattccgctagtgcaactaatgcttgatcgaaatccgcacccgcatcaatgtttaattcaaaaccttctttgcgtcctcgtaacgtgactgcatccatagaaaaatcaaaccccttaccgttctgattttaattttagcaataaatattttaaaggcaaatacaaaaagacaaaataaaccaaatttaatgcaattgtcggtgctaaaacattactaataaattcgactggtgttactgttgcataaccaatcaagcgattcatgatgtaaatcgtactctcgagtaatgttaaacacaagacatcgattagcccaatgaaaaaggctgagtcaggtaaatattgttttaaataacgcactgtatagataatgagcggcactgcaaaagtgtacatcccgatcatccccgtataatacaaatcgtataaaagaccaatccctgctgcataccacgtaagttggcgttcctctggtaaaacaaaggccgttaccactaacacgagcataaatagccggctaatcaacgtatgatctggtgtatataaccattgttcacataaatgactgatggcgccatccaaataaaacgcaacgagtaagtagattggtaataaatagcgccgttgtaatcgcgtcacacccatgctactcaccttcaatcgttcgtttgatgacagtcacaacggttaaattgtttaaatcagcagctggggtcacataaacagttaatgctaacccaaaatcgtctttcttaactgctgctaccttaccaaggtacaagcctttaggggttaatccacctaaaccagacgtgattactttgtcacctttttcgattgccgcatcggtcttaatctgcccgagcttcaattgtttccggtcagcattgtaaccggacatgatcccattaacttgcttaccatctttggtattcaccacagcagcaaatccgttactactttgatccgtacttgaaacgagttcaaccttcgaattagtcttgttgacttcaacaatccgtccaataatcccagactcagacatgacgggcatatcttttttaagtccagctaaggcccctttattgataaccaatgcattttgccaattatcaggattccgggataaaacagacgcattaacggttgtataatccgtcaaggtgccttttaagccgagttcctttttcaaacttgcattttcttctttgagggtttgggtttgaaccttggtttgagctaaatcatcaagttgtgctttaagttctttgttttcctggtacgtattaatcaagtctgttaaggcatctacccctcgaccaatcccattggccggcacgctaatgacttggttagtgatgcccgttacgtcgttgccaaattggcgtacgaaactcggactctttttgttattgcgtaaaccaactgacattgcgatgaagcccatgcagacgattagcatgattaataacacaattaacttcttatttgaaaaaaacttttgcatggtttcttcgccaccatccatccttaatatcgtaaaggtgggacaaaaaccggtgatcagtagtccttcctatagcaatcgattcacaacccgaatctgtcactaatttaggcgctacgtcaacgctgaccgcttcttgtcccacttctactgaacgattaatttttcttcataacatcgatattctttaatgattcgccagttccgactgcaacacagtctaaaggatcttgagcgataaagactggcactttagtagcatctgaaatcacttctggtaagtgtttcaacaatgcgccgccaccagttaagacaatcccgtgatcaatcacgtcggctgcaatttctggtgatgtttcttcaagtgtttctttgatggcttcgataatggctgtgacaacttctttgatggcttcagcaatatcaacagcttgaatgtccactgtcttaggtagcccagttactaaatcgcgaccacgaatgctcatcgcttcaatttccttagcgcgttctggtgatgctgaagcgatttggaatttgatttgttcggctgttctttcaccaatcaacaagttattgttttgacggatgtaagaaatgatcgcgtcatctaacttgtcgccagccattcgaattgaacggcttgaaacaatcccacctaatgagattgtggcaacgtctgttgtcccgccaccgatatcaacgaccatgctaccagttggatccatcacaggaagaccggcaccaattgcagctgcaaatggttcttcaatgacgtatgcatcacgagcgcctgccaccttagttgcatcgattacagcacgtttttcaacttcagtcacaccacttggtacgcagaccattacaaatggcttgctagatgagcgacctaatgatttttcgataaaatatttaagcatggcagcagttgtatcgtaatctgcgatcacgccatctttcattgggcgaattgccacaatactaccaggtgtccggccgatcatgtcgcgggcttctgagccaacagcaatcacgtcaccagtttgtgtatttttagcgacaacagagggttctctcaagacaatgtctttaccgtccatgtatacgagtgtgtttgcggtacctaagtcaataccgatatttctagtccctaatccgaacactatttttctctccttcagttaccaaacgtttttatagtcattggcattatatcataattttacgtaataaaaaacgcaatgtaactactatgttaacggattttcagaaaatttgacaggtctcgcctaaaattaacagattcttaaagaaaaaagcgttctcttttactccactaagtaaccctcttctcgcaaactgagatactgctggcttccaataatcaagtggtctaggcatacaatgcccatcagttcaccacaggcgacaattcgtttagtgaaggcaatatcttgcgttgacggcgtcaactggccgcttggatgattatgcaccaaaataaattttgctgcagaataacggaccgctaatttaaagacttcccgcggatgcgcaactgaactatcgagtgtaccaatataaatctgtttcatctgaataatttgatttttaacgtctaaaaaaacagctagcagttgttcttgcgtttcgcccgctagtgtttcaatcatgcgacggccaaccatttggctcgatgcgaccacaccaaaccggagagttcgttgcgtttgcaatcggtgactcaattcacagatggcttggatttcaatcgctttgactggtccaattcctgccagtgtttccaactgcgttaaacttgcttgttctaaatcccgaaagtcaggataatgcgctagcaatttgcgcgccacctcaccaacagataggtgactattaccagaacgcaaaatgacgattgccaattgctcgttcgataaacttgctgcgccgtactgcattaattgttctcttggttgtaattgtcctgtattccccgccattgtttgcctcccacaaaaaaagacgcatgacgcgtcttcttggtttaactaacaatacgttaattaacgggcttatttttctaaatacggaatcacttgagccaaatccccaacggtcgcaagtgtttgctgattggttatcgcagttggtgcaattaaatcagggaccataatcaccggaatggcagctttactagcggccatcacaccattaggtgagtcttctaatactagggcactaggcgctggtaaggctaatctatccaacgcttttaaaaagatttcggggttcggtttgccgtgagtcacttcgtctcccgcaacaatttgactaaaccgtgattgtaggccagtactttgcataaagtcatcgaccatgctacggaaattgctcgatgcaatcacccgactaatcccctgattatcacagtaatctagtaaatcgactaaccctggcttaattgcaacaccatctgcttcaacaaccgttgctacgttacggtatgaacgatcaataaattctgttgcggccgttgccgaaccaagctttgctttaaaataattgcgtaaatacgtatcagtggtccctaagatggcatggtgatcttcaggtgtaaaatcaaagcccatttctttagcggcccgaatattggcttggtaataaatcttctccgaatcaaccaatagaccgtccatatcaaaaataattcctctagttgtcattgactattctcctttaaaatattggcgaatcgtactaattaaatatagcgaacccgttacgagtaatacatcatcagccgacacatccgctaataattcggttaatgcaaccggccagtccggttcaaatgtaatcgtctcatcaactgctgcatattgggccgctgttgccgcgcgtggattatcaggaaccgtagtcagcaccatccgcgtcgctatttttttgagctgtggtaacatctcatccagatttttatcaccaagcgctccgaataacaggtaaatgtcacgatttttaaattgatgccgcgttgtctgaaccaattgcgccaccccttccggattatgtgcaccatccaagataattaacggctcatcgttgattttttcgaagcgcccaggccagttaacccgttttaaagcacgtttgatgtctcgaacctctagtttttgttgcgtcaactgtaagtaacaccaaaatacttgtaatgcaaccgcggcgttttcaatttgataatcccccatcagcggaatctgtaattgtcgatacgttaccgcgtcattttggaaagttaactgttgcccccaagtaggtaacgttttgaccgcagcactcgaaaaatcacagccactaatggctaacgaactattcaaacgagttgccgtttcctcaaccaccgtcagtgcttcttttggtaattgaccaatcacgactggatgaccagccttaatgatcccggctttttgagtcgcaatttctgcaaatgtcttgcctaatagagcctgatgatcaagaccaatcgacgtaataactgatatcagcggcgtcaacacattagtcgagtcatacaaaccgccaattccgacttccacaacggcgacatcaacctgctgttgtttgaaatatagaaacatcattgctgtgatccattcaaactcggtcacttcaaattcggggtcagttgtttgaatctgggcaaccgttgtctgaatttgttgcgtaacagttactaaatcggcatcactgattggttcctgattgataacaattcgctcgttgaaccgcataataaacggcgatgtgtaacgaccgacttttaaacctaactcttcaatcaaacaactgaccattttgacaacggatcccttgccattagtgccagtcacatgaatgaattgttggttttcttgcggattaccgagacctgccaacaattgcgtcattcggttcaggttcgcttctttatgtaatctggggcgcgaatgaatatacgccaaagctgtttcgtaatctgtcactaacatcgccaatctcctttaacaaactgtctctattttagcatagattgcacgcgaatcgatgcttaaaaactggcgcacacaaaaagaccacctcagtttttaaggtggccttaacgtgcttttggttgcaacaacttccgcttaatctaaaaattccgttaatcctaaaacctgaattaacggaatttttgtattgatgctcagttgctacccgcaaccaatcacacttctttcactaacgtgctcctcgagcagccttttccggttaactgcaaaatgggcatcatggcaaaaaacgccacaatgcccattttactgttaatcctcaaagcctaaccagctcgagtcgcacttcttttttaacgtgttttcatcaacagcttcctgtgctttgctacacttatcaaatcggcgcttacagcgccaattcgctaagttaggcaaatgctcagaagctaaccgttgatgatgcacttatgcattttttaattctgctactcgtttttcgactgattggtattgttgttcgtagtctgcttgtttgtcgcgttcttcttggaccactttttctggtgcgcggtctgtgaagcccttgtttgacaacttgcctttagcacgtttgatttcaccgtctaaacgtttcaattcgccttctaaacgggcgatttcttcgtctaagtcgagcaattcagccaatggcacataaacttctgcaccactgataatggctgtcttcgccaatgctggtgctgttaaaccttcagcaatttcaagtgacttaggatgtacgaagcgttcgatgaagtcttggttttgtttgaagatcgtcattaatggcgcatcttgaatgttgaccaagacatcaattggcttgcttagtggtgcattggcttcggaacggatattccggacacttctaattagatcgattaacgcattcatttgcgttgttgcttctggatcgtctaattcagcgtgcacttctggataagccgcattgacgattgaatcgccagtatgtggcatactttgccagatttcttccgtgacaaatggcatcactgggtgtaatagacgcaatgtttggtctaaaacataagccaagttataacgtttattagcaatggctgcttggtcgtctccgtaaaggacttccttcgccatttcaatataccagtcacagaaatcgttccagataaagttatacaatgtccggcccgcttcaccaaattcgaagctttcataaagccgtgtaacatctgccaccgtttggttcaattggcttaagatccatttgtccgttaaatcaaggttagcggcatctggcatcttcgttggcgctggtgtgtcttcaaggttcatgatgacgaaacgacttgcgttccaaatcttattgatgaagttccaggcagcatccatcttcgtgtaactgaaacgaacatcttggcctggtgttgagccactcgttaagaaccaacgcaatgcatcggcaccgtatttttcaatgacttccattgggtcaatcccattaccaagtgatttactcatcttacggccttgttcatcgcggattaaaccgtgaatgaggacgtgttcgaatgggcgttgttctgtaaattcgagactttggaaaatcatccgtgagacccagaagaagatgatatcgtagccagttaccaacgtattggttgggaagtagcgtttgaagtcaggcgcttcagtgtttggccaacccattgttgaaaatggccataaggcactactgaaccatgtgtctaggacatcagaatcttgagtccagttttcgatatcttttggtgcttcttcgccgacatacatttcaccagtttgtttatggtaccaagctgggatttggtgcccccaccataattgacgcgaaataacccaatcatgaacgttttccatccattgtgtgaaggtattttcgaatcgttctggcacaaagttcaccttttgatcggttgcttggttcttcaaagccatttcagcaagtggcttcatcttaacaaaccattgcgttgaaagccgggcttcaacttgtacaccggtccgttcagaatgaccaacactatgtgtcattgggtcgactttaatcaaataaccttgttccttcaagtcagcaacaatcgctttacgtgcttcaaaacgatccatgccgttatacttgccggcactttcattcatgctggcatcttcgttcatgacattgatccgtggtaagtcatgccgattaccgacttcaaaatcgttagggtcgtgtgctggtgtaatcttcaaagcaccagtaccgaaatccttatcgacatagtgatcagcgataatcggaatttcacgattcattaatggtaatgtgaccgtcttgccaacaaggtccgcataccgttcatcatctggatgtacagcgatagcagtatcaccaggtaatgtttcaggacgtgttgtggcaatttcgatgctcccagaaccatcggtcaatggatagttaacatgatagaaggccccttcatcatcttgatgcaacacttcgatatctgataaagccgtccgtgcttttggatcccaattgatgatgtattcgccacgatagattaagcccttgttgtataaggtaacaaagactttacgaacagcgtctgataagccatcgtctaatgtgaaccgttcacgtgaataatcaagtgataagcccatcttagcccattgtgcgtggatggttgcggcatattcatctttccagtcccagacttgttcgatgaatttttcacgacctaagtcataacgtgaaatcccttgttcagctaattttgcttccactttagcttgagttgcaatcccggcatgatccatccctggcaaccagagtacatcatacccttgcatccgtttttgccggattaacatatcttgtaaggtcgtatcccaggcatggcctaaatggagtttacccgtaacatttggcggtggaataacgattgaataaggtttggcatctggattggcatttggcttgaataaatcagcgtctaaccaatcttgataacgaccggcttcaacttgatttggatcatatttggttgacatttctttgtgatcagtcatcttgttcactcctttaaaatattgcgtttaatggcaaacaaaaaagcattcctcacaataggacgaatgctttttcgcggtaccacctaaattaggactagactagtccccaactcatgatttgttaacgaacgaaattgtccggttagccctacttaatttcaggttaacagctcacaagctaccgattaattggtcattggaagacgtctcagccatgcatcttctctctaaactagcccaatcttaatcgctcttgttcaacgcgttgttaatagtttagctgagtgaacgccaaaggtcaagcgtcaccggcgttcattctgaaaataaatcccgaatcttctccccaaaaaaatcctgagaacaacatactgttattctcaggatttttatagtttacaatagttcagcaatgatttcttcgtcttgatttaagaattgatcgccagctttgatttctgtcactttaattccagcaagtgagcgttcaatcaaggcatccacatcgatgcgttgttcgtagaaccgggtcttatctaagttaggccgggtcttcggtgctggtggtgcaaaaatggtacagcaatcttcgaatggcatgattgataattcgtacgtatcaatatccttcgcaatttcaatgatttcattcttatccattgtcgcaactggccgcacgattggcgttgttgtgacatcattgatagccatcatactttcaagtgtttgtgaggccacttgaccgacagattccccattaaaaatggctaaaccttggcgcttagcacggatttgatccgttaaacgcaacatcatccgccgttgaatggtcattaagtaaccttctggcacagaatgcttcacttcttcttgaatttccgtgaatgggacttcgataaacttaatcccaccaacgtatggcaccaatttcgccgttaattctttggccttattcaaggcattgtcgcttgtgtatggtgggctaaagaaatgcaccatttcaatgtcgacaccccgtttgagcgttaagtaacctgctactggtgaatcaatcccaccagataacatcaacattcctttaccggcagaaccgactggtaagccaccagccccttgaatcacttggttggttaagtaaatcgcatcttggcgaatttcaacccgcaaagtaatgtcaggttttttcatttgcacttctaattcaggtaattcatctgataagtaaccacctaattcgcggttcatatcattcgtatccaagaagaaattgtgatcagaacgacgtgtgttaactttgaaagacatcccaggtttgccgatttctttcatcatggcaagcgccatttctttaacagaatctaaatcacgatcaacttggatacttggtgagaagttttggatgccgaagacgtgacggagacgttcgataacgccttctgcatcgtcgccgtttaaaacgatatgcatccggtcacgtttagggtgaatccggagttgtttatactcgtgaagcgcctttgtgacgttcccgtttaaccgaccgataaaatcgttccggtttttaccctttgtcgaaagttcgccgtagcgaaccataatttcagtgtattgcatgcctatctccttttagatggtagtttacgaattaatttttttgaagcgttcgttaatttgatcgaatgctttgatgaatgcatccgcttcttctagcgtattgtattcatcgagggatacccgaatggcgcttgtcgcaattttttcattgacgtgcattgcctttaaggtactagattcagtccctttcttcgaagagcaagcacttgtcgttgaaatatagatttcgtgttcttcaaacgcatgaaccgttgtttcaccgcgaacacctttaattgcgaagcacaaaatatgcggcgcaaaatcaggcgtcagttgtgaaaacataaccgttttatccgattgactgatatggttaaagagtcgttctcgaatagctgcttggcggtgtactttttcagtctcatcggtcaataacaaacgtaaggctttggccattgccgcgatggctggcacattttcggttccagaacgtaaatcatgctcttggcccccaccggttaaaagcggcgctaaatgacgcccgcgtttcttatacaaaatcccagtcccccgtgggccgtggaatttatgccctgataaggtcacaaaatcaacgcgttcgttgaaaatcgcctcttgaatgcctttgccaatcccttgaacggcatcaacgtggaaatgaatattaggataatccttcaaaatatcagcaatggcttcaagtggctgacacgttccgatttcgttattaatggccatgatcgaaactaaaatggtatcaggccgcaatgctgcttttaagtcagccggatcaattcgaccaaactgatcaacgggtagataagtcacatcaaagcctaatttttccagttgctgcatggatttaatgatggctggatgttcaaccgatgtcgtaattaaatgtttcccaaacgcccgtttttcaattgccgtgccttttaagacccagttatcgccttctgttccaccgctggtaaagaagatttcatcgtggtctacgcctaataaatcagcgatttgttggcgtgattgttctaaaatatgaaaggctttttccccaatcacatgtaaactagaggggttgccgaagaactgttcactaaccgcttgataggtctgaagtgcgcctggcgcgattttagtggtggcactattgtcaaaataaatcatatcgatccttcttactaaaaattagtgttttaacgttgtacattatagcaaattggttattaaagacaaccaattaatctttaacaaaacaaatccgagacaaaatgcgtcttgtctcggactggtgagcatctaagtgactaattagttgcgtctgacttttggtcgtaataggccttttcaacttgtgtgtaagcacctggatcaaccttttcaagggccgttgccaataagtcgacagctttagcatagtcgtattcttcattaaaaatggtttggaccgtcacacaggcttcctggatggcgggaaaatctgcacgatatcggttggcatattgtaacaattgctccgtaatcaatgcactgtcaattaaggtatccgtcttggccttcaattcatctaaatcctcttgaacgagaattaattgcttcgcgatatcgtctaaattaatcttaatttgattcaaatcatgatcaagtttttgaatctcatcagaaacaacgaagaagaaatccaaatatttctgttgtaaaccaggtaaattaaccttttcaacagcgcgcttcaagttacgtagttcaagttcaaactggcgtaagttttcattagcgacgacttcgccttgatgcaaactagcaacctgatcatgaattgcttgttgtttttcttcgatgacagttagccgttcgtcaatcccggtcaaatcttcagcaatcgccgtgtaaaccgcttcgtggttggcaatcttcgcttggtgcccttcaactaacgcctgttcttcaccaatttgcttttgtaattgtttggcgcttgccaactcaccatgtgtgagtgcataactctgattgagatgatcgagttccaataatagctcatggttctgacgttcagcatgttgcacgaatgtcgcggtggttggcaattgcgtcgcgactgccttcttggcagtcatctcagcttctaattgatcatataattgatcaatgccacgtgcaatttcatcgttattggcttcaaccgactcaatggccaaatcacttaacaaggtagtgctcttatcaagttgatccattagttgttgttgtttgacttcaatctgccgatcatcaaattgataatgttcttttaacatttgatggtaggtatcattaatttcaaccagttgttcgggaaactcgttagctaattcgttatagcgctttggaatccgttccatctggtcttctaattgcgttgtttcagtaattaatttctgcaaaatggccttagcccctagatggtcgccggctgttgttagttcgttggcttcgtcaaaatccacctctaagcgacctaacgttgcttcaagcgcatctaatgcaggtccaaacgaaaaactcttagtcaacaaacgtttacgtagttgttgatattgttctcgtagacgctgaattttttgacgtgtatcggcttcattggcaagtagattttctaaagcatcttgaacatccagtaaatcttgatccgtttcagtcaagtacgcccgcaattgtttgagaatccgtgcaacctgaatgaattggtatttggcattggccgtttccgcatcaaaaagatagccttcaatcgtgctgaagttatggttggtaatctgctcatattgtttttcccaacgatcaaagttttgcaaactttcgcccgtcaaatgtaacgaccgtaacttcgttaagcgttccggaatcggcaacgccattaagtcgcctttatgtgcttctagttgtttaatttgtttgataaaataacgttgataaaaaacaacacttaggtagccaatcagtgcgacgactacgattccaatgagaatgtaaaacattcaaagacacacccttttacaatttaaatcagatttgttagtccgttcatccacttcaattcattaaactatgtttgattatagcatgaataagataacggttcagcaataattagcgataaactttagaaaagctgcaattttaatctgaatttgcttgacgttgccgcacaccgtacgctatactagccattgtgtaaaataatgcagcagtaaacggtaaagccgtcaacagttcatttgcccagagttttggttcaattgtgtaaccttgcggctgcaaaggtgaagattgttaataagtgaactgaacgattactaagtttacatcggattattttactccaaaacatttattggaggatttttttatgtcacgttatacaggtccaaagtggaaactttcacgtcgtttaggaatttcactatcaggcacaggtaaagaacttgctcgtcgcccttacgctccaggccaacacggtaacgaccgtcgcggtaagatttcagaatatggtatgcaattgagcgaaaaacaaaaacttcgtttaatgtatggtttaacagaacgccaattccggaacttatttgctcgcgctggtaaaatccgcgaaggcaagcatggtgttaacttgatgatcttgctagaacaacgtttagacaacattgtttatcgtttaggtttagcaagcactcgtgcacaagctcgtcaattagtaaaccatggtcacgtaactgtcgatggcaaacgtgttgatattccttcatacgaagtaaaacctggtcaagaaatttcaatccgtgaaaaatctaagaaccttgtaatcgttaaggatgcaatcgaaggcacagttggtcgcccttcattcgttagctttgatgctgacacaatgaaaggttcacttgttcgtttaccagaacgttcagaattagaaccagaaatcgacgaagccttaatcgttgaattctacaacagataagcagttatctgttcaattaaaagagtcagacttaggtctggctctttttttgcgcatttaaagacgcgtgcctacttagcacacgcgtctgatttaatctatttagtctgtaccaactcatataaaggcaccatcttcatcaaggtcgtttgaatatcggccatgagagcttcgggttggtcgaataatgggttgtctttcagataaacttttccgaggagccactccccttttttggtcttagcaaacttatcttgaatcagtttcaagttctccgatgacattgggaatttttgcttggtcatgtgatcgtagcttaaatcatagtcggcaaagtcccttaagaggctttctgtttggcttgccaataacggtgcgtaatccgtcttatctggcatctcagccattaaagcaaaccaaacgaagatccgatcatcccaaaaaccgacttcaaagtgcggtatcatcttatacccgcgtgagctctcactaagtgccatccaagtattcattggtggatttttgaagcggcgtaaatgcttggcaatatgcaacgagaattcgcgttttgtttctactacgagttctgcttgcaattgcacaccaaatacttcaaactttggatcaagttgcgtataaatcttgtctaaccggccctttaaggtttggtcatcaaaaatatcaaaatcagcacgtgtaaacatctttttcctccaacatggtatacttaggtttaattctaatatagcacaattcagaaatgaggcgactattttgtcagataatgatcaattacaacaacacttggatagtgccatgcacggcgcaccacaaaccaatcccgatgaacgccgccgctacctcggctcattacgtgaacgcgtcttcttaggcattactaaccaggaactcgccactgcgcaagctaaattcgaagcgcatcttacggattataagccctattccgtcttattaaacggcaagaaccccgctgctaccgattatttagcggccctttcagcacacgggattccgttcacgctcgttaacaacgaaacagccaaaaccgaaccaacggccttcggtttgttagtggttgccaaagacgcgattaaccatgaggcaattacgctcgatacactataccctgatccaaaaaccacaacgcaagatgcacccaccaaaaaaggtggtttcttaaaacatcttttcgattaacactaaaaaggcccgcacagtttaacttgtgcgggcctttttgcattactttagtcggtttcaatcgctaattctgggaaaagtaattgtaagacagtcattgaaacgcgccgcgcttgacccatcattgggaacaagtgcatcaacatcgctggattgtagtttgcttctagcacaaccgtcatctcagggtgctccggatcatatggttggtataagtttggcacaatgatatcgattcccgtgatattgaggttcaaaatttcagcaacctgttcagcaatcgcaaagtaactttgatccatctcatcggtcacgtcaaccgaatcaccaccatttgagacgttggaattttgtagtaagaagacctgtgaaccacgcaatggcacatcttcagggcggtaaccttgttgtttcaacatgagcaattcccgttcaccgaggcgaatgttttgcaacggtgtcaggtgcgcttcgccacgtaatgggttgtcgtttttcttagcaacaagttgggcgattgttgaacgaccatcccccacgacattggctggaatccgttctaaaacagcctggaccttatgattcatcactaagaaacggtattccgaacccgcaatgaattcttcaactaaaatttgctgatcgtacgtttgtgccagtttaaaagcagcaatgaagtccgcttcacttggacgcgttaaaaatgtggtaatgcccgcccccatgttactgtgttttggtttaatgacaatcgcgcgctgaccaaacgccgcttgataatctgctactgccgtctctaaagcggtatattcggcacccgctggcacccgcataccatgacttgccaataaaattttagtcactaccttattatccactaacggcccactaattagccgatctaaactcgttatattcccatttttgactaattcatgatgatgttgataggtcagctcaataaattgttcatcgcgatccaaaacagccacatgcaaccctttttggaaagcgtcaaacatcagcatttgtgttgataattccatatccgtgtatccctgtaactgatagggagtctctgtcagctcacatttaaaacgttttgcctgtttgagggcaaatgcctttagcgagtcctcttcaatcgcttgtgttaagcgataactcaaggtttgtcgatggtcctgaacacgctcattcatcactgtccaagcttgtttaaaacgctcattcagatgataatccgtaatgaattgggccaaatcggccatcacagttttcaattgtgtttggagctgcgatggctgcagcggattctctaatgctactgtgtcatttaactgacgacccgtctgaatctgagtggctaaatcaccggataatttcggcaaggataataagtacataaagaataagtgtaagaagtctagctgttgttgatcaatccccgtcgcagtatacgggttaatatcaaacccccgaaattctaaataatccacaccagtctctaacatctgatccaatgagtgactccgtaaccgcacagttccgtaaaattcgcgttccgaaattaagtcgccattagcaatcgcttggcgcattgaatcaacatatgcggcaactgaatcaaaatgaattaataattgcttattgctgtagccgaataattcactcgagcgtaaactccgtacagggtgttctggtaatttcgtcatatcttctaaaaagcctggttccgctatcggactcgcaccaaataaatacgttaaaacatagtgataacgcacgtaattttgcgcaatctggatgtacaacgcatcgctaaaatcttttagactcacatagtgatcatgatagtattcatcaaataaacgcacaattaacgtcgatgacaggctaaaattataatggatgccagagaccatctgtagacgtcgaccgtagcgcttcgtcaaatagtcacgataggcttttaccgccggtgtgtattctgaaattggaatggttaattcatcgtctggtaacaacggtggcatgctgaggggccaaatatattccgaatcggccatacttgattgcaatacttgttcgagcgctaataattgttgttggacatctacggtctgttcgaaggtatccgtaaccagttccgtttgcatctctgcaaaatcagtcgcaatgtatggatgaaacgttcgcgatcctaactcactggggtgcggttgttgactcaatgcgcccaatccggtcactcgctgcccctctttttcgaccccaaaagcaccttggttcaataaaggtgttaagcgtaattgtttaatgttctcaaataattgattaggcattttgaaacctcttcttaattcagtcttatacaactcattatacacatccctaaaaccttttaaaacgataatcactacgaatttgcgcgacatgttatactaggaacaacctaaacattaaaggatgaacgctatgcaacaacctctcgcatttcgcatgcgtccgactaacatcgatgaagttgtcggtcagacgcacttagtggggccgcaaaaaatcattcgccgaatggttgatgccaaactcctctcatcaatgattctctacggaccgcctggtactggtaaaacgagtatcgctagtgccatcgccggtagtacccagtacgcttttcgcatgctgaatgctgccactgatagtaaaaaagatttacagattgtcgctgaagaagccaaaatgagtggcaccgtgattttactcctcgatgaaattcaccgcttggataaaaccaaacaggattttctcttaccacatctagaaagtggccgcattatcttaattggtgcaactaccgaaaatccatatatcagtatcaaccctgccattcggagtcgggcccaaatttttgaagtcaagcccctcactgaagccgacattcatgtcgccattcaacgggcactgacagataaagaaaaaggcttaggtgcactagccatcaatctcgatgaaacggctgaacaataccttgcccgcgtcacaaacggtgatttacggagtgctttaaacgccctcgaactcgctgctcgttcaacaccagcgaatccagacaccaacgtcatcgacatcgatattgacgttattgaagaatgcgtgcagaaaaaagccattactcatgataaagatggcgatgcccattacgatgtcatctccgcctttcaaaaatcagtccgtggcagtgacgttgatgctgcgctccattatatgggccgtttgattgaagccggtgatttaatgtcgattagtcggcgcttgatgacaatggcctacgaagatatcggcctcgccaaccctcaagcctgtgcccgtacagtcgaggcaattgctgcggctaaacaacttggttttcccgaagcccggattccactggccgtagcagtgattgatctctgcttatctccaaaatcaaattcggccatcaccgcaattgataacgcgttagctgatattcgcgctggcaaagccggtgaagtccccgatcatctccgtgatgcccattatgcaggggctgaaaaacttggccacggtgtcgactacaaatatcctcataattatcccaacgactgggtcgcgcaagattacctaccagataagctcttaggtagtcattattacgaagcaaaagcaactggtaaatacgagcaagtcctcaaacaacagctagaacgcttgcgccaagccagtccgcataagtgaacggttacaaaagtgttgtgttaacatcacgagcgtgctactataatagtaggatttctaaggtgtgcgcgtcttcccaccttatgttgaccgatcaagtaattcgttaatgggacggatgagttattagcgagtgtagactttttcgcgaaggaaccaagtctaataataatctgacccacctgcattttctagcgggctcaactatcgggaagcatctacggcaccactagatttcccaaagtccaacgactttgaccgggctaacgtttacgttggcccttttttgttgattattttaggaggttgcacattgattcaaatcgccataatcgtttttttaatcattatcgccctacttggtgcgattttatgttactaccaagacaagaagttcctactctttgatttaactgaaaaccggcatttaggtcgattgatgtacttttcagggattgcactcatcggtgtagcgatctgcggagctttgatttactggctattgccactagtctggacattggtgacgctcgttgctgccagtttaatcgccggcttagtcggccttagctttgcaactaacctttaagatttacttttggcactgaactagcgtacaataaagatgtaaaattaaatgaggtgatgacaatgttacaacaatacaagcacattttggtcgcaatcgatggttcttatgaagctgaactcgctttccgtaaagcagttgaagttgcccttcggaataacggacaactccacttgattcacgttatcgatacccgcgccttccaaaatatctctagttttgattccgcaatggttgaacaagtcacagaaacagctaagaaaacaatggacgaatacatcgtgactgccaatgaacttggcttaaaagatgttgactatagcattgaatatggcgcaccaaagagtttaattgcccgcgaagtacccgaaaagaaaaatatcgatctcatcatgattggtgcaactggtttaaacgctgttgaacgtctcttgattggttctgtaacggaatacgttactcggaccgccgtttgcgacgtgctcgttgtgcggacagatttagataataaacacgcactcaacaagaaacacagtagcattggtcacgaagaagcataaattagcaatcaaaaagccgggacgcttatgtcccggctttttttagtggttaaccacttattcagccaattgttgatcaacttgcacaataatctctggatgatgccggattaacgccaatgttttagcaaccgttaaatcctgtaaggcgttctctcgatgaagcacatgttctgcacgaccaagaatgaaatacaatgcatcaagtaagtaaagactttgcttatcgattgcttcgtcaatcgcaagctgagcgtacttaatcgcaccttcataatccttcaattcaaaaagaattcccgctaagtgattataaatctgcaactcaacttggaaatcggccatagcaagtggatcagaattctccaacatttcaacggcttgttctgcataaatccgtacacgctctaaagcgcccttcatcaaataggacttgctaatgccgataatacatagaataccgtaaacatccgtctgagaaacaacgtattgattgaaggcacgattgaaaaaaaaaaagtgcatcgtccggtttattctccagcaataacttaatttgaccttggaaataataataccgtttgtaatcatctgctttgaccagttgatctgtgtagatctgctgaatcaaatcacgtgcttttttgaattcattggtaaataacaatgcttgcacacgactcaacaagacgtgtaattgatcatcttcttgcacaatcactgagtccaacgtaatttcaagccgcttacaaatttccaagagaatctttgtgcttggcacctgttcttttttctcaattaagctaattgttgcttgcgtacaaatccccttagctaactccgcttgagacatcccccgtgctttacggatttgttttagtttatcccctaatattctcattttaaatactccaattacatcattatttaatttaaaattaatttccggaaaatataacccaattaagtaatttacatcaattagcaatgacgctactagttgcgtttattatacactatgaactagttatgtggcattacttatttttttatccaataagtattttacactacatactaaacattaccaaacatttatctttaattaattgttaaggtgctgttcgatagtacgacaaaaaaacggcttcctgcagcggaagccgttttttataacgttgctaatattgccggaacttcttttaatgattcaatttgataatccgctgccgattgatcaatcgcgaaaagtggatcaaatggttttaatgcgatgacggttaaaccagccgccttccccgcttgaatccccagtgcagagtcttcaatcgcaaccgcctcggttggttctaaatgcattcttttaagcgcttctagatacacatctggtgctggtttattatgcgcaatctctgcaccactaacaaccgtttcaaaataaggttctaacgcggtttccaacaacatttgttgaataattccgcgctcaccagcggacgccaaaccgatttgatatgtcggtgcaacggttgctaataacggttgcgcgtctgggttcatgatatttttaaaaacgattggatgagccgctttatacgacgtatagccgtttttaattgccgctcgttccaaaacagtatggtttggaaacaactgttttaaaacggcattcatattggaaccaatttgtttacgactttcctctgccgttagtcgtgcgccaattgcattcaaaaatgctaagcgttgttcaaaatagtacggttcactatccactaaaacgccatcgacgtcaaaaataatcccttttactgtcatcttctctcaatcctatctggttaattaaaataaatctgaaatcttccgtaagtaatccgcaattttatcaggtaattcaggttgtagcaacaatgactgtaaaaagcgattgcggttataccaccgattccaaaaaccaacggtctcctgtggtgccatagtcaacaatgaacgctgccactcctgtaagacgattaaacaataatcgacatagagttgatgcttgttcattaaactgattagaacgttcgtcagatgactatcttcaccatatgcgagtgcgttatcagagaagcgatacgcctgtagcacaattgccatcatcaaaatcttatccgcacgttggatttcaggtgtttcgttaagttctgaccagacattgatgatatgcgtcatcgcatgcgcccagcctttaccatcaacgtatcctcgtgaatctaattcgatgactgtataagccattactcgccgttcaattgccaataattcggccgtacttaatacatgataaaaagtgcggttagcatataaaatcccggccaaaaacatcgcgctaaacgaacgtaaaaaaacagcgtcattttcaggttctaaaatatgcgcgaataaataatcatcttgcaataagcggtccttgacccaaatcaattgggctggggttaaaaccgtctgccgtaataatcgattgaataagtaaaaaacacctttatcgcgcacttgcgaatctgagcttgcaagatgccttaataaatcatcgagctcttcatcgctgatggtcgcttctttgcctttggttttaattcgctcatcaattgctgtgattcgttgcaagactgactcgttgtcctcaggtactacgacatgtgtccgccgcgtcttatattggacgccatccatgacgaccaatactttttccggaattgattgatagatgtcccctttaatcaatgcactacgaatcgcgtctaactgttgcatcacattttgaacttccttcatcaatcatcacccactctctactgaaaacatctcataactaactattataatgcattcggccacagacataaactatcaatccttaaacaggcccacgatatgacaaaatcgtcacctcgcttagaataaattccacctttagactgaatcaatgtaacttctagcttgatacgattaagacatcaattcacaaggagtgtcaatcatgaaaaaaatcattctattactgttctcacttggactaattgttatcggcggtccaattatcggatcagccacaactcagaatatgacggacggcaatgaccttgcccaacagtgggaccggttcaacctcttaattcccagagaagccgtctatgttaaaacagcacaccaatacgggacacaacaagcacatggcgattacctttaccggcaacctgcttaccgtactgatggcagtcattacgaagtcgttttccaagcgccgcgcgcactaaaacctaatcactacttaaaattagatgccaagggacgcttcgtcaattcttgggctgtcgtttcaaaatctgaattgcccgttaaactgcagtctagtctataattgtaaaatacaatcgaactaaatgctgttaattgcgaaatacaaacgagggatttcgcttttttcattgcttacatttaataagtatgctatattattcgcatgcactgataaaaacgatttcacaagggagtaatgaacatgacagaattattcgatttacaacaaacacgccggacaatttatgcacttggcaaaaacgtttcaatgagcgaagctgaattatcagaattaatcttcaacaccattaaagaaacaccaactgcttttaacgcccaaggttcacgcgccattattctctttggaaaagcaaatgaaacactttggaacgatattacagcaactgccttaaaaccattaacacctgcggaaaacttcccaagtacacaagctaaattggcttcattcgccgctggtgtcgggacaatcttgttctttgaagatcaagacgttgttaagaatcttcaagaaaacgtgccattatatgccgaaaacttcccaacatggtcagaacaagcttcaggcatggcacaatatgccacttggttagccctcgcagaaaaaaatgtgggcgctagcttgcaacattataacccagtaattgatgaagccgttactgcaaaatggaacattccatcaaactggaaacttcgtgcgcaaatgccatttggttcaatcgaaaatccagccgatgctaaagactacaataccgatgcaagtcgtttccaaacctacacaaactaattttaaaccgaatcgaccagagtgcgcatgcactctggttttttattttacccaacaaaaaaagcgactcgcatccgcgaaccgctttttactttaaggagaatgagagattcgaactctcgcgtgggcagaacccacctgacggttttcaagaccgttcccttcagccagacttgggtaattctccatatcaaatcttacaacgtttattataatatcaagttcgctaatcactgtcaagcctgttttttaaaaataactgctatttacacccgcccaccaactcggtatcataaaggggtgcatttaaaatcaagtaaaactacttggactggttcggaaacttcccagaataaaaaactaaggatctcaaggaggttagaaataaatgcaaactcgcaaaatcattatcgattgcgatccaggcatcgatgacacgctcgctttgaatttggccattcaatcgccagccgtggaagtcgttgcaatcaccattgtttgcggcaacgttcccgtccaaatcggcgtggacaatgcctttaagtgtcttgaacgcctcgggcggctcgacattcccgtttatgttggtgcggataaaccgctccataaaccatttgtcagtgcgcaggatacgcatggcatggatggtttaggtgacagccatatcccgcgcctatccactattcaaccggcacaacaatccgccgctgattttttagcagccacttttagtcaaccgagcgatatcagtattatcgcactcggaccattgaccaatattgcgactgcgctccagcgaaatccagatttaggtcggcactgtgcccgctttgtttcaatgggtgggacctataagagtcacggtaactgctcacccgttgctgaattcaactactggagcgatccggatgccgcactgttggtattcgaccaactcgatcaaaagattgaaatggttggcttagacgtgacccgcgaaattgtcttcacgccaacattgctggcttattgtcagcgtgtcaatcctgaagtcggcgactatctaaaagccatcacccagttttattttgattttcattggcaatatgaacacattatcggctgtgtgatcaatgatccattagcagtcgcctattttatcgatccaaccctttgtcacggctttgaaagttataccaccgtcgaaacaaccggcatcagcattggccaaacactggttgaccggttcgatttctggcaccgtcctgccaatagcctcatcttaactaaggtggacaccaatcgtttctttgaacagtttttgaccgtcgttttaaatgcacaagcaaccctcattaaaacggacttaccaaaacttagataaggaacctattatgcgaaaatttaaaacacaacacttaaccattctggcacttgccattgcactcaattacgtaggcgctaacattgccctatttttacggttaccaatctatctcgatagcgtcggcaccattttagccagcaccctattaggtcctctggcaggcgcattaactgccacttgcagtagcatcatcagcggtgtcacgaccgacttatttgcgctttattacttgccagacggtctattaaccggcttactcgctggatggttcttataccaccaccaacggacgaaacgcgagttaccccttgttgctttaggtgtcgccattcccggcacaattgtcagttcattaattacttacttcttgttccacggtatcacctcttcagggtcaagtttaattgtacaactactaagcggcttgggactaaatcagtttgtcagcattacactggttcaagccggtacggattatctggaccggctcttggcaatcattgtggtgacacaggtttgcgtccacctcaaacaaaaaatcaagacactctaatcaattaaaaaaaagcaagtgtgcttctaacatcaattagaaacgcatttgctttttttagttttgcatcagtaacgtgacatactgttctagataatctcggtcgacctcatcgtaagcgccaacgacgcggttatcaagatccaaaacaccgattagttgattagccttgatcattggcacaacaatctcagaacgtgcagccgaatcacaagcgatataattctgatgttgcgccgtgtcttctacaattaacgttgtttgctttgcggcggcttcaccacacacccctttacctagtgcaatgtgcatacacgagacgtttccttgaaatgggcctaaaatcagctcagcatcttgatacagataataacccgcaaaaacagtctccggtaatatttgatttaataacgccgaagaatttgctagattagcaattaaattcgtttcacctgccagcaaagcagcttgttgttttaagagcatttcgtaagcctcgactttagcttcttttgatttaaacatcacaatcacttcctcttttcaagctattatagtggaagcttgctgcgttagcaattcaaaacatcccttaatttcgacattaaaaaaaccgcacatcggcggtttttttaatgaaaaattgttttatttcttcgataaactgtctctggttcgccctcttcatgattgacgtaccgcgcaatcgcgtataaataatcagagagccgattcaagaaagttaatacagcttcgttaatcggttctacttcctgcaaggcgacgacttggcgttcaacacgccgcgcaattgtccgacaatattgtagtttcgctgctgatggtactcccccaggtaaaataaattcttttaaagcaggtggaacatctgcatactgatcaatcttagcttctaaccatttcgtgtatgcgttgtctgtccgatacccccgcgaatcatccggcgtcgctaaatctgtcccacagtcaaacagaatttgttgaatctcaaccaattccattctcaatgccggataatcaggtaaatcactgatgacgacacctaagtatgaatttaactcatcaacacccccgtatgcttccacacgaattgcgtttttgcgcactttttgaccgccgataattctggttaatcccttgtcaccggtctttgtatatagtttcaatccgtagcctcctaaaactgtcatccattatcaattttagtgtaccacgtttgaaagcgaatttttggcgttgcttaatttttaacacttgtctgcttgtatcaatttaagtaatgcctcaattcgacggtacgaaacatcacatgtatcgccatttgcaaatatcacttgatgcgtctccttatcaatccgtacgactttgtccggattcactaggatactcttatgggctctgaaaaattgtggcaattgcgcttgaatcgtcacgattttccctacaaattcacttaaccgatgatcactgtgtaagaagacgtgccgtgctttatacgctgtttcgaaataattaatctcttgaattgccactttttcaaacgataatccatcatcatattcaaaatgagctggttcttcagctaatggcacctgttgttgtcgtaacttaatggcatcgttaatggttgcttgaatatctgcacgaacctgtgctaacccgcgatccttcaaaataaaattcaaaacattaattcggcgttgaatggtttccattaaaagttcgtcatgtgttgaaacgaacacaatctgtgcatatggatccaattcacgaattttaagcgccaattccatcccatccagcacgtcattctctaaatcaatatcaagaaagtaaacgcccccttgcgtttgactttcttgtaaaaaaattaataggtcatagccattcttagtcttcaaacgcacctgagcatccaatatattttgttgaatatatgccgttataatctcttcataactatctagtaaaacctgtttatcatcacataaaaaaatatcaaccatgggtctcctcctgttcaacaacaagcattgcaacgaaatagtctccatcttgttttaacattaagctaaaatctgagcgcatatccgtgatttctttagcagttgtgagcccaagcccgcgattaatccccttcgttgaataaccagcctgataaagctgaccaaattctactggtgtattaatcgtatttttgacacaatagaccatcttacccttttgctcgaataaactgacactgattgaaccatctttaatatcatttaccgcgtcaattgcattatccaaaaagattcccagaatccgtaattcatcaaaatactgttgttgttgcttaaataaatccggttgaacctctaaattaaagggaatccgattattatgtgcttcaatatacttgctaaaaataatgcctttaatataagcattattaatctcttgaaaccgtccaattgcctgatcttgaatcgtgtcaaagttataatgcgttagtaaatcatgaaaatcctgcattaaaactgggctcccttgttcattgataattgtctctaaagccaataaagcattggcgatatcgtggcgaaacttgcgtatttcacggtagttacgctctaactgttcaacatacagcgttagatttcgctgactttcttgttctacgttgattctattttggcgaatcacagctttcgtatacaaaagcattcccacaatcaccaaaactaatagtaatagcacaagtcctaacacaaggtacaaatattcaaccggcagattcgcatgcttaaagctatcaaaaagcaccatcactgccaccacaaataacgcgagaccggctaaaatcgtgccggccacgcacataccgtatgaagcaatggatgctttaataagctgatctaaccgttggacaattaatcctaatccggctgcaatcaataattgactcaacataattaaacacaccatttgccaattaaactggctactcatcagattatcaaggccctttaagtgagtatacccaattaaccccaccgttgtcagaaccgatgatagcatcacgatgatgtaactaaagatggttgcgataattaacgcataacttgtctttaatttacgcagatttttaaagccatttaaccaaccatataatccaacagttgccaaaatcagccatagctcttcaagaaaatttccaattaataaatccattccctgaataaaagcaatgccgactccaactgataatagtagttgaaatctgttcgttcgtttcaacttccccgtcaaaaataatactaatagtagaaacgaactaaacgtacttagattaatgacaatctgcattgccagcggcattttcattgccatgcataaaactccctactcgaaccttaattccaaaaccagaaaattaaattttgaatgttactcatcattatcatacccctcctttcatattatgaatacccatgattggtgactcatttcgattttatcacgtaatttttttaaaaggattaaatgtcataaacgtatacttgtctgcattaaacgtatataattaatcataaatatagataaataattactatttggaggctaaaaatgtttttaggccaattgatccatcaacagcgactcaacaagcaactgacacagtctgaattagcagcggggatttgcacgcaaaatacaatcagcaaaattgaaaagaaaaatctgccccccacaatcccaattctaattaagatttgtacacggcttggattgacattaaatgaacttttcaccgaatttaacgcgctcgacactgccagtgacgaaggcgtgatttctgcggaagttgctttattagcaggcgattctggccctgctgccgcattaattaccgatatcgacttcaaggcaaccgaacatccttatcccgccatcttcttctttttcaatggctatttaagttaccttgaccatcaatctgaattacagattttttccgcttataactcgttcacagcggccatcggtgacgacacttcaacgttgaagttacttctaaataccggtatgggtttaatttaccaagaagctggcgaggaattagctgatttttatttcaataataatatcaatttcatcaaccaacttgatcacatcaatgtcattgatgttcaacgcgtcctatttgcttcgcgtcacacagcagcctatatgattaaccaacaccgcattgatgcagctatcgagtttttgacgaaagccctcaaactgagtcaaaaaaatcaaatcatcaaacaagtcgatcatttgtattacctccgtgctcgggcgcgccaacaaagcggtcgagactatgcagaagatcgcgaaaccgcgttagtttttgccaaataccttaaaaataacgcgttaatcgctaaaattaaagcgttaaactaaaaaacactatccgattggatagtgtttttttaactaattggttgaacgcgactggcaatcatcaccactaagcaactcttgatcatttcaatcggaaaatacggcacaaaaccggtcattaagccggtcactacggataattttaatgaccagattagccagagtgtgccaaatccgagttgaataatgcttgctagcacattgccgccgagaagtacgcgattcgattgtccaaatagttgctgactatagtgaataattgccacataagcgataaaaccaatcagatagccgcctgttggtccgaccagcactgcagccccactggcataatttgcaaagaccggtaagccaagcatgcctagcatgagatagctcccgatgaccagtcgacttaagcgccatggtaacgtggtgccaattacaccaactgcgagcgtttggagtgttactgaaaccagcgaaatcggtagactgacttgagcgctaaccattaataacgccaagcacatcccgactaagctaacttttctggcaaccgatagtgtcatttaaatcagctcctccttaaaatcaatcttttggccgactgccacttgcgagccattgctcagaattaacgtgccatccgctaaaagctgtgtaatgacaagcccattttgcaaacgtcggccaataatcgccgaccagttgcaataatgagcaccaatcgcctcgtccgcttgggccaatccggccgctagtcgattaagatacgtggcacaaaattgattgatgttcacttggtgggcgtttacggcttggcttacatccattatgaaactgccgctgccgtcctttttgaatatgtgcatgctttctacaataggaagagaattcatagttcactgggctaccagacccccttacaagttgaaattgcaacacttacgagccaaatggccgcctgatttaatgctttccagggttcaaataagttattaatcgcgattaatgatttatttgagctgtggaaggtaaacgcggttctgaatgtctcttaaaatctgtctcaaatattgacttcaatccatacctcctataatttttattttatcataccatttaatactgcatactagttaaatctctctaaaaatttctatccaaatggtgttacttttggtgttactttctacatgcacaaacaaaaaaagccagaaacgccttcaaataagcatttctagcttatgcaattcaattaccccacactgccttccatttcataactaatcagtcgatttaattccaccgcgtattccattgggagttccttggtgaatggttcgacgaagcccatgatgatcatttcggttgctttggcttccgagatgccacggctcatcagataatagagttgttcttcagaaattttagagactttggcttcatgttccattgagacgttgccgtttagaattgtgttgtacggaatcgtatcagagctggagcggtcatccataataatcgtatcacattcgacatgggcaaacgaaccgtcactgtcgcgttcaaaacgaacagtcccgcggtaatcaacggccccgccatctttggcaatcgattttgaaacgattgaggatgacgtattcggtgcggcgtgaatcatccgcgcgccactgtcttggtcaacgccttcgccggcgacggcgattgagagcattgtcccccgtgcaccttcaccatcgaggtagacacttgggtatttcatggtcatttttgaaccgagattcccgtcgacccattccattgtcgcattttccatggcttgggcccgtttagtttccaaactataaacgttctttgaccagttttgaatggtcgtgtaacggcaatagccatcccgtttcacaaagacttcaacgaccgctgcgtgcaagctatcacttgaatagcttggtgcagtacagccttcaacgtagttcacgctggcgccttcatcgacaataatcaatgtccgttcgaattgacctgaattttcggcgttaatccggaagtacgattggattggaatatccgtccgcacgccttttggaacgtagatgaacgtgccacctgaccaaacggccgagttaagcgctgagaatttattatcagttggtttgaccaacgtactgaagtattccttcacaatttcagggtattcgcgtaaaccggtatccatatcggtaaaaatgatcccaagtttttcgaattcttcacgcatgttgtgataaaccacttctgattcatattgcgcactggaacctgctaaatacttacgttcggcttcaggcacacctaagcgatcaaacgtttctttgattttgtcgggaacatcttcccaatcgcggtattgcttgtccgttgccttttgataatacaacatgtgttctaaatcaagatcggataagtccggtccgaaatctggcattggcattttttcataagcgtgaaatgattttaagcggaaatctaacatccattgtggttcttttttctcacgcgagatggcgcgcacaacgtcttccgttaaaccgcgcccagttgaaaagacgggctctacatcgtcgctaaagccgtagtcgtactcttcaaattggggcatcgttgtctcttctgtcattcgttagtttcctccgtttctgcgtggttcatcatttgaccggttgttgcacgtcggtcatcgctatttaaggctttgtggagcgccttccaagctaaagtcgcgcatttaatccgcgcagggaattgttgcaccccttgtaaaatcgcggcatcttctaacaatgaccagtcttcgtcacgatcaccaatcatcatatccgaaaagcgttcgatcatcgcctccgcttgcgccggtgtcttatgcatcacggcatcggtcatcatgctggcagaagcctggctaatcgtacagccttcccctgaaaaagcaatctgactaatctgcccgtcttcgagcaccagttcaagttgtaacacatcgccacaggtggggttgcgtaattcaatttcatgatcggcagtcgtcaagtgaccatgatgatgcggatgttgcgaatggtcaagaatgacctgccgatataagttatctaatttagagagtgccattttggaaaaactcctttgctgcttgaatggcggtcacaaacgttttcacgtccgcttcggtattgtagaggtaaaaactagcgcgcgcagttgcggcaacgttcaaccattgcatcaacggttgtgcgcagtgatgaccagcacgtacggcaacgccttccatatcgagggcggtcgctaaatcatgtggatgtaaattgtcgagattaaaggcaatcacaccggtgcgttgggcggcatcttgtgggccataaatcgtgaggccgtcgattgcttggagctgcggtaaagccattgtgactagcgcttgttcatgggcttggatatgatccatcccaatttgcgttaaataatcaatggcggcccctaagccaattgcccccgcaatgtttggcgttccaccttcaaggcgccacggtaattctttaaacgttgaagattgtaagcccacaaagtcgatcatctcgccgccgtattccacgggtggcatctgttcaagtaatgcttgcttgccataaagcacaccaatgccggttggtccaagcatcttatgccctgaaaaggcgtaaaagtccgcatcaagtgcctgcacatcaaccatcatgtgcggcacggcttgtgccccatcgaccaccatgtaaccgccttgtgcatggactaaagccgcaattgttttaatcggattgacaaccccaagtacgttggaagcatgcgccaaactaacaattttcgtcttaggcccaatcacctggcgtgctgactctaaatcgagttgcccatccggtaataagtcgatgtaacgcaatttcgcgcccgttttctgcgccagttgttgccacggcacgagattactatgatgttccatcacactaatcacgatttcatcgccggcttcaaccacggttgggccgaaactgcctgcaacccagttcaaactttgcgtcgtcccttttgtgaaaatcacttcggcactcgcagcggcatggatgaaggtttggaccttcgtgcgcgcggcttcatactgggcggttgctcgttcagctaaagtatgcacaccacgatgcacgttcgcattgtcattttggtaataagccaccaaccggtcaatcacggcttgtggtttttgggtggtcgccgcattgtctaaataaacaagtggttcatcattgacgatttggtctaaaatcggaaagtcgcaccgataatcatttaactggttgaccatcgattaacttcctttcaatcgtgtccgttaattgttggcgcacgtttttatccggaatttcacttagaacagcgcctaagaaaccacgaattacaagtcgttgcgcgacttcttttgaaagaccgcgactcattaaataatacatttgttgttcatcaacgcgcccgacactggcagcatggccagcttgcacgtcattttcatcaattaataagagtgggttcgcatccccgcgtgctgtccgcgataacatcaagacgcgattttcttgttgggcatcggcacccttagccccttttaaaatatgcccgatcccgttaaacgttaacgtcgcatcttctaaaatgacgccatgttgcaagatgtgcccaattgaacgcggcccaatattcgtcacacgcgtatcaatcccttgaatctgtttaccagttgagatggcgaccactttcgtttcagcatgtgatccagcacccactaaatcagaatcaaagtcaccgatgatattgccatcattcattgatcccaatgcccaatcaatccgcgcatcgcgcatcaagtggccccggcgattcaagtaagtcgtcacggattttccaaaggcatcaaccgctgaaaaatgaacgtgactgttatctttagcaatcacttccacgacaacatttgctaagttcttgtggtcacccgctgtttggagattttcaagataactaaattcactgttttgttcggctactacgaggacgtgatgaataaaatcagcgggttgagtgctgtcctgtacataataagccgtaatgggttgcttaatcaccacatttttcggcacatacaagaagagcccactgttcatcaaagctgtgtgaaaagccgttaagcgatcctcgttcggtttcactgtgacttgcatgtagtattgttgtaccaaatcaggatgttcttgtaacgcggtgaaaatgtcggtaaaaatgacaccttgttctgccaattctgccggtaaatttaacttggcagttgtctgaccaatctgtactgcgtacggttgatcagctgaaagattcgctgccgcagatggcattaaactcaaatcggatttaacggctgttggcgcatttgctgccatcactggccaatgtttatagttaattttttcaaagataggcagttcgagttgctcaatttgcgcaaacgctgcttgacgcatttcagcaaaccaggccggttcttgatgcaattgtgagaatgacgcgatttgttcaggcgtgatggctaatgttttcttcatcagaatcgccccctatttactttcgtcgtcagtcagtttgatatccaagcctaattcgtcacgaatcccgacataaccttcgtcttccaaacgttttgcaagtgacgcatcaccagtcgtgacgattttgccacccatcatgatgtgcacataatctggcacgatgtagtttaagagccgttgataatgtgtgatgattaatgagccaaaatcagccccgcgcatttcgttcacgccttttgaaacgacttgcaaggcatcaatatcaagtccggaatcaatttcgtctaggatggcgaatttgggttcaatcatcatcaattgcagaatttcattccgtttcttttcacccccagaaaatccttcgtttaagtaacgttctgacatttcttccgtcatatccaagaatgccatccgttgatctaattttttcaagaaagccatcactgaaatctgatcatcttcagcccgacgtgcattaatcgccgcacgcatgaattcagcgttcgttaccccttgaatttcagcaggatattgcatcgccaaaaataaccccgcacgggcgcgttcatcaaccggcatttctaaaatattttggccatctagtttgatctgaccttgtagtacctcatacttgggattgcccataatcgtttccgaaagcgtcgacttcccagtcccgttaggtcccatgatcgcgtgaatttcacccgtgttcatttccaggttaacaccttttaaaatttccttaccgtcgatgccgacgtgcaaatcgataatctctaatttagacatagatgatcctccaagaatcgcattctagcaattattatacgctcttaattctatgctaattgagaactgttttcaatgcttgaatgcatgaaaaaagaccacgcggacaacgtgatctttttcaatagattcgcacgggaaataggttaatattactcattgatttgatactcttctaaaaccgttgagccatttggtcagccacaatactggatacaaaaatgttaataaaaaatgcggaagtagttcagtggtagaacatcaccttgccatggtgggggtcgcgggttcgaatcccgtcttccgctttttttgtacccgtaataaaatagtttccgggaagtagctcagcttggtagagcactacgttcgggacgtaggggtcgcaagttcaaatcttgttttcccgactctcaaagacttgttgatgacaagtctttttttgtgcgtccaattgattagctactaaaagtcagtaaactttcattttgtactgataatcgttataataatagtcaacgttagtcaaagttaaacttttgacactgaaaaacgcagaagactaaatgaaggggctgatatgtttgcaaagtcagaacatctcggatattattgaagcctatctaaaaaagatactggctgacaatgaacaaatcgaaattagacgctccgaaattgctaagctttttaattgtgtgccgtcccaaattaactatgtgattaacacgcggttcactgagcagcgcggttatgtcgtgaatagtaaacgtggcggcggtggttatattcggatcgtcaaggttcaatttctcgatgatcgggactttttagaagcgttaattgaaaatgttgatacgcagatttcccaggcggacaccttagccattatccagaaactatatgatgaacaaattctttcgcaaaaggaaggcaatttgatactcgcggcaacgagtccacagacattagcggttaataataaacaattagaagagcagcttcgagcacagattctagttgcagtgttagaacgactacgatatgaaattaagtaaagagtgggggattatccatgaataatctatttacaccaagtgcaaaaaacgtcttaatgatggcacaagaacaagcaaagaaatttaatcaccatgcactaggaacggaacatctcctattagcaatcgtattagaaaatgagggaattgctgggactactttacgcgaattaggtgtcaattcgaccgatgtccttgaagaaattgaacgcttaaccggatatggcgatgctgtaatcgcttctggcattggcggttatttaccatattcgcccaaagccaaacaagtactcgatattgctcgggttgaagcgcaacaagctaattcggttaaaattggcacagcacacctattattagcacttttacgtgatgatgatattatcgctgcgcggatcttgttgaacttaggacttagtttagctaaaacacgccaactactacttcaaaagatgggtgtggatacggcaaccgctaaaaaacgggctaaagcagctaagaataatgccgatcaagctgggacaccaacgttgaaccaattagcgcgcgatttaacacaacttgctcgtgacaatcaaattgatccggtcgtgggtcgtgatgaagaagttcggcgacttgtgcagattttagcccggcgttcgaagaataatcccgtcttagttggtgaacctggtgtcggtaagacagcgattgctgaaggttttgcgcaacgcatcgtcaatggcgatgtaccaagtgacatgcagcaaaagcggctcatgatgctcgacatggggtcattggttgctgggacaaagtatcgtggtgaattcgaagatcgtttgaagaagattatcgatgaaatctatgcagatgggcaagtgattctctttattgatgaattacacaccctcattggtgcaggtggcgctgaaggggcaattgatgcttctaatctcttgaaaccagcattagcgcgtggtgaattacaattaattggtgcgacgactttagatgaatatcaaaagtacattgaaaaagatgcagctttagagcggcgattcgcgaccgtcacggtcaatgaaccaacgccagaagatgcggaacaaatcttaaagggattacgtccacgttatgaagctcatcatgggattgcaatttcagatgaagctttacatgaagcggttgtcttatcaaatcgctacatcacgaaccgattcttaccggataaggcaatcgatttaatggatgaagcgacggctaaagtgcgcttggatgctgttaaccagaagacaccgtcggataaattagaacaaaaactacaaactttaaatgacgataaagaagccgctgttcgcgcgcaagattttgaaaaagcggcgacgattcatgagcaagaagtaaccactaaggccaagattgccaagttacaagctgccgaacaagaaaacggtgttcgcagtgacattcaagtgactgctgaagacatcgctcaagtggttgcgcaatggaccggtgtgcctgttactcagttgcaacgcaaagaaagcgaacgtctcatgcaacttgaaaaagtcttgcataaacgggttgttggccaagaagaagccatttctgccgtttcacgtgcaattcgtcgtgcgcgcagtggtttgaaagatccaaaacgaccaattggttcatttatgttcttaggcccaaccggggttggtaagacagagttagccaaagcattggcggaagctatgtttggttctgaagacaacttgattcgggttgatatgtctgaatatatggaacgttacagcacgagccgtttagttggggcggcccctggctatgtcggctacgaagaaggcggccaattaacagaaaaggtccgcaataaaccatattccgtcattttatttgatgaagttgaaaaggcccaccctgatatcttcaatatcttgttgcaagtcttggatgacggctatttaaccgattcaaaaggacgtaaggttgatttccgtaatacgatcatgattatgacatcaaacttaggtgcgacagccttacgtgatgataaatccgttgggttcggggttaaagatgtaactgctgattataaagcaatgcaagggcgcattatggaagaattgaagaaagctttccgtccagaattcttaaaccgaattgacgaaacggttgtcttccattccttaacacaacctgaattgcgcgaaatcgtgaagattatggcgaagaatgtcttgggccgtttagcggaacaagggattcaaatcaagatgacagctgcagcgatggatgttgttgccaaagctgggttcgatcctgaatatggggcacgaccaattcgacgggcgctacaaacccaagtagaagatcagttgagtgaagcgttgctcgctggtgagattacgatgggtgtaccggtgacaattggcgcaactaaaggtaaaattaccattaccagtaagactgataaagtaactgtttaaacgtaaataaggtgtcagaccaattggtctgacaccttattttttttgtcctaaaagggtcgtgagctgttcaatttcagttttaatcgcagcgccgatattcgtctgactgacacgttgacgttgactaacttgatcaatcactcgacgcgtggaaataatgtcttgcatcttggcaattgcattggcccgtgtggtgaacggctgatgggtgactaactgcattccatacgaattgtacaagagcgtaaagccaccaatgccagttgtgtggtgataagcttttgaaaagccgccatcaatcacgatcattttgcgattagccatgattggattgtggccttttttgacaggtgtgtgaccattgagaatgtgcccggtttctggcgttaagccaaactccaacaagagtttctcaatgaagtcttcctgatggcggagttggtaatatgcgttcttcttttcttcgtgtaaaacggggtcggcgctgaagtagcgttcgaaggtcgtcatcgcattcttgccaaatagtggggagagcggtcctgtccacaggtaccagagtaaatcggtggataaattatcttgattgagcgggtggtcgaagctcgttcgaatttggtgatcgaagaagtcgagtaatgatttaccagcgtattgtcggttagcgagggttagcgtgaggaagttgccggcttcatcaactggaatacagccgtgaaaaaggaggttctggttgtagagttggtacatgttaccgttgtcgattaaaaaacggagatgcttgcgtagtttttggcagtgggtaaacgtgtttagcaatgatgtaacaatggctgcttcatcggaagttaatatttctgggtgtgtggggtcgactgtttgaaagcaggtgttatcaagtggatagttatgaccatttagatgaattgtctgctgttcaaagtcaacatggctgagggttaagcggtggtccattttgaaatcaggattgcgtttaatcacggtttgttccaacttaaactgcatgatggcgatggcttggtgcacttggttgatgcttttcttttcagctgttgagattgcgtgttgattggcagcaacctttggttcgaaggcgggattgggctgataagttcgttgggcaaactgaaccagttcgctaaggtcaattccgtaagctttctcgatgatggctaaattattgtagcgtgcgcaaatgcgtaaaaggttgagcatacatagttgagaaccgctagcggcgccgaaccagagaatatcatgattgccccactgaatatcaaccgcggggagcttggtgagttgttcgacaatcagatcgggacacggcccacgatcgtaaatgtcaccgatgatatgccaatgatcaaccactagtcgttgaatcgtatgactggtggcgataattaaggcatcggcttggcccatcgaaatgatggacgtcgtgatttcttggaagtagcgtttcttatcgctgttagctacatcgccgtacattaattcttcggtaatgtagacgaaatcgggcgccattgctttacggacttttgagcgtgtgtattttgtggagacaaattttaagaggtcgattaaccgtttaaaagtggtgaggtaccactgatcgagttcgctagcagatagttgtgcgtgtttgagtgcaagccgctcggttgggtagtaaactaaaaaagcgaacgcctgcattgtgtcttcagtcatttcaccggaaaagacctctgcaattttttgccggagattccctgcgccagtgcgaatgagatgctggaaggcatcatattcgccatgtaaatcactcatgaaggcttcagtgggtttggggaggttcaagatggcctttaagttgatgatttcggaagtaattgccattttagtggggtatttttcggataacgttttcattttattgttaatcattcgccaaactcctttgataaactaatagttcgattataccaatcataaatataaatgcaaattactttgtttaaaagctttttattagtatataccaattaaaaagtcgcgcagtttagcgcgacttctggaaactattgatcttggatggtgccatcaacgtggcgctcaactttcatttgcgtcattgggatgtagcccagtttagggacgattgtcttttgaacgtcttttgattggatgaagtggatgaaacgggctgtttgatagttaggtgcgcccttagtatacatatgttcgtaagaccagattggccatgcattggttgaaacgttcttttcggtaggctcaacgtcgtttaacttaacggcttgcaagttacctttaatgtatgggaaggcgaggtaactgatagcgcctggcgtttgttcgacgattttttgaacagtcccagaggaatcttgttcttggctggtaacaactttgtcggttttaagacctaatttttcaaacgtttgacgtgtcccacttccttgggcccggttgataacggtgattttttcgttaggaccaccaacggattgccagtttgtgatttcgcctttaaagatgcctagcaattgtgcactggttaaatttttgatgcctaactttttattaacaacgggtgcgattgcaaccacagcaactttgtgatcaacaagtttcttagcatcgataccatctttttcttcagcgaagatgtccgagttaccgattgtgacgttgccaccactaatttgggttaaaccagttcctgaaccgccaccttgaacggtgacgttgactttagggttatccttttgatattgatcgccagcttgctcaacaaggggttgaagggctgtcgaaccaactgcagtaattttagcgccttgatcctggctttgacttgcactttttgattggccttgacaaccagctaataaaagagcggccgcgccaactgtgagtaatgccatactaatgcgtttcataatgattcctcctgaggactgatttaagggtacaagttcagtatagagacgtcgtgtaaagattgaccgctaattcgtgtaaaaaacgtaaatgataagtcgcgagtttgtaaatgattccgtgaggggcttgaagattgtcattagagacttttgttaaaagggtgggtaggcgatacagccataaaatgctatgattaaatgagatagttagaaatggagcaaatacataatgttatttattgcgatgatctacttgtttgtctgtttaccttttttatgtgctattgtccaacgcaatgatcgccaatttattcaattagttggtatgttgatcaatttggtgcttgtattaggattaacgattttagtgacttttgggttgactggtcatgttattcattttagtgatggtttgttccaaaagttatttttactcaagtttattatgttgattaccattattcaaggcgtcgtgttggtgacaagaaggtggcgccaaaaatggttaacatttgaactggtaccagtcacacgcacaagacattggtttagctggtggatttttagtggtgccttattaatatcagttgggtatttcttgttgtcagctagtttttggacaaaggcaaattttggcttgttaacgcccgagcagatagtttataacttacgccaaccgatgacaggtgttgacgatggttttattaattcatttatcggcggtccggtgctaggtgccattacttgtttaatcagcgtttttttgttctgcaactatatcagacacttgcaactgttggtcactcataaaataacacaccacttagaactcaaggcaaaacgatttgtattggtcagtgcgttattgttttgtggtttgacgacggttgctgcgattaaaattgatgctgttggtttttacgaatatctaacggcgaattcaccatttattgaagaaaattatgtagcaccgaataaaaccaaattaacgttcccaaaacaaaaacgaaatctaatttatatttatgctgagtcactcgaatctacagcaacatcaagagaaatgggtgggcagatgaaaaccaatttactaccagaattgacggcgttagctgagcaagagggtgttcacttctcaaattctaaccgatcatttggtggtgcccaacaattaccaggaacaggctggacagttgcgggaatggtcgcccaaacatcaggattaccgttgaaagtgccggtggatgggaattcctatgcgacagataaaaagaatcatttcctaccaggcgtcacgtcattaaataatattttggacaagcacggctatcagcaaaaaatcttgcttggatcggatgcgacttttggtggtcgacgatcatattttacgcagcacggtaatgttcaaattgatgatttgttaactgcgcgtaaagatggtcggttacctgaagactattatgtttggtggggctatgaagattcaaagttattcgaatacgctaaggaaagtgcgttggagcttagcaaatcagatcagccatttaacttaacgatgctaacggagaatacgcaccacattggtgggtatccagaaccgaatatgccagaaaagtatggtgaccagtattcaaacgttatcgccttttctgatcatcaaattgttgaatttattaagtgggcacaaacgcagtcgttttatcagaatacgaccatcattgtcaacggagaccatttaggcatggatgtggagtattataagaagattccggccaataaacggcatgcatttaatttgattttaaatgcaccaaaagcaagtcaggttcaaaccaagaatcgccagtttagcacaatggacatgttcccaacgacgctcgccgcaatgggggttgatattaaaggagaacgtttaggcttaggaactaatctattttcaacgaaaaagacattaatagaagaaaagggattgaaaaaggttgataaggccttgagcgccaaatctaaattttataataatcaatttatctatgataagtagcaccgaggcagattattgacttttagtagtaaaagaagtatattatacagtaactgcgaaaatccgtagaaaaatttattgtgctgatctattgtccagcacggtattcatgaaaaacaaaaatagttagtctgatttattcagcttaaaataactgtttttgttttttttctgctcaaaattaccaaaaaatggcgatgtaatattttcttaacatttgtcatatttttgtaacaatgaggctgcggaaaacttatagaggggtgaacaatttggcaggacacttagtgaattacggtaaacatcgtactcgtagaagctacgcacggattaaagaagtgctagaactaccaaacttgatcgagatccaatctaattcctatcaatggtttttagacgaagggcttcgtgaaatgtttgatgacattatgccaattgacgattttgctggtaacttatcattagaattcgttgattaccaacttcttgaacctaaatacacggttgaagaagctagacaacatgatgccaactactcagcaccattacacgttactttgaaattaacaaaccatgaaactggtgaaattaaatctcaagacgttttctttggggacttcccattgatgactgaccaagggactttcatcatcaacggtgctgaacgggtaattgtttctcaattagttcgttcaccaggcgtttatttcaacagcgctgttgataaaaacagccgcacaacttatggtacaactgtcattcctaaccggggtgcatggttagaatttgaaacagatgccaaggatattgcatatgttcgaatcgatcggacacgtaagattccaatgtctgttttagttcgtgctttaggttacggttctgatcaagaaattatcgatatcttaggcgacaacgattcattaatgttgacgttagaaaaagatatccataagaatactgacgactcaagaacagaagaagctttgaaggatgtctacgaaagacttcgcccaggcgaaccgaagacagctgatagctcacgttcattactttatgcacgtttcttcgatgctaaacgttatgatttagctgctgttggtcgttacaagatcaacaagaaattaagcttaaagacgcgtttattgggtcaaacattagctgaaacacttgctgatcccgatactggtgaagtgattgctgctaaagatacagttgttgatcgtcaagtgatggatgctttggcaccatacttagacaaagaagacttcaagacggttacttaccaaccatctgatgaaggtgtcttaccagaaccaatgacactccaagtgatcaaagtgtactcacaaaaaacacctgataaagaaatcaacttaatcggtaacggtcatatcgatgccaagattaagcatgttattcctgctgatatcatcgcttcaatgaactacttctttaacttacaagaaggtctcggttcaacggatgatattgatcatttagggaatcgtcggattcgttcagttggtgaattgttacaaaaccaattccgaattggtttatcacggatggaacgtgtggttcgtgaacggatgtcaatccaagacacaagcaccgtgacaccacaacaattgatcaatattcgcccagttgttgcctcaattaaggaattctttggttcatcacaattgtcacaattcatggatcaaaccaatccccttggcgaactgacgcataaacgtcgtctatctgccttaggacctggtggtttgactcgtgaccgtgccggttatgaagttcgagatgttcactatacccattatggtcgtatgtgcccaatcgaaacccctgaaggccctaatatcggtttgattaacagtttggctagttacgctgttgttaaccgttacggcttcatcgaaacaccatatcgccgtgttagttgggatacgcatgatgttactgataagatcgactatttaacagccgacgaagaagataactatgtcattgcgcaagccaactcaccattaaacgatgatggttcattcgttgatgatactgttttagcacgttacaaagatgacaatattgaaacttcaatcgacaagttagattacatggacgtttcgcctaagcaagtagttgctgtcgctacggcctgcattcctttcttggaaaatgatgattcaaaccgtgccttgatgggtgctaacatgcaacgtcaagctgtgccattagttgacccacatgcaccacttgttgggacagggatggaatataaagcagcccacgattcagggattgctttattagcacaacatgccggaactgttgaatacgttgatgcgaaagtgattcgcgttcgtcgtgaagacagctcattagatacgtacgaattaatgaaattccgtcgttcaaatgctggtaagaactacaaccaacgtccaatcgttgcaaaaggcgatcacgttgatgttgatgaaattatcgctgatggaccagctatggaaaaaggtgaattagccttaggtcaaaacccattgattgctttcatgacttggaatatgtataactacgaagatgcgatcgttctttcagaacgtttagtgaaagaagatttatatacttcaatccatattgaagaatacgaatcagaagctcgtgatacaaaacttggacctgaagaaatcacacgcgaaattcctaacgttggtgaagattcattgaaggatcttgacgaattcgggattgtccgtgttggtgctgaagtcaaagatggcgacattttagttggtaaggtaacgcctaagggtgtgacagaattatcagccgaagaacgcttattgcacgctattttcggtgaaaaggctcgcgaagttcgcgatacatcattgaaagtacctcatggtggcggcgggattatccaggacgttaagatctttacgcgtgaagctggcgatgaattgtcaccaggtgttaacatgatggttcgtgtttacattacacaaaaacgtaagatccaagtcggcgataagatggctggtcgtcatggtaacaaagggactgtttcaatcgttgttcctgaagaagatatgccatacatgccagatggtaccccagttgatatcttattgagtcccatgggtgtgccttctcgtatgaatatcggacaagttcttgaattacatcttgggatggctgctagaaacttaggcatccatgttgcaacaccagtctttgatggtgcgcaagataaagatttatgggacgctgttcgtgaagcaaacatgccttctgatggtaagagcattctttatgatggtcggaccggtgaaccattcgatacacgtgtgtcagttggtgtcatgtactacatgaaactagcccacatggttgacgataaactccatgcacgttcaatcggaccttactcacttgttacgcaacaaccattgggtggtaaagctcaatttggtggccaacgtttcggtgaaatggaagtttgggctcttgaagcttacggtgccgcttataccttacaagaaatcttaacttacaagtctgatgacgttgttggtcgtgtgaagacatacgaagcaatcgttaagggtgaaccaattccaaaaccaggtgttccggaatcattccgagtattggttaaagaattacaatcacttggcttggatatgaaggtcttggatatcgataatcaagaaattgaattacgcgatatggacgacgatgatgatgatatcgaaaacatcgatgcattatctaaatacgctaaagaacaagaagccaaaaaggcacaagaagaagctgaaaaagcacaagcagcaaatgctgatgcagtagatccatctgctgaataaagcgtgctataaattatgaggaggtcggccctttgatagatgtcaataagtttgaaagtatgcaaattggtttagcatcttcagataaaatccgtagttggtcgtatggtgaagttaaaaagccagaaacaatcaactaccgtactttaaaacctgaacgtgatggcctttttgatgaacgaatcttcggacctacgaaagattgggaatgtgcttgtggtaagtacaaacgaattcgttataaaggaattgtctgtgatcgttgtggcgttgaagttacacgttcaaaagtgcgtcgcgaacgcatgggacatatcgaacttgcagcaccagtaacacatatctggtactttaaagggattcctagccggatgggtcttgtcttagacatgagccctcgtgcattggaagaaattatttacttcgcatcatacgttgtgattgatccaggcgatacagccttagaaaagaaacaactgatgaccgaacgtgaatatcgtgaaaaattagatgaatacggtaatcgttttaacgctaagatgggtgctgaagccatcaaagaattgttacgtgacgttgatcttgaaggcgaagttgctgaattaaaggaagacttgaagtcagcacaaggtcaaaagagaacgcgtgctatccgtcgtttggacatcttagatgccttccgtaaatcagggaataaccctgaatggatggttatggatgctattccagttattccaccagatttacgtccgatggttcaattggaaggtggccgttttgccacatctgatttgaatgatttgtaccgtcgtgtgatcaaccgtaacaaccgtttgaaacgtttgttagacttgatggcaccaagcatcatcgttcaaaacgaaaaacggatgttacaagaagccgttgatgctttgattgataatggtcgtcgtggccgtccagttactggacctggtaaccgtccattgaagtctctttcacacatgttgaaagggaaacaaggtcgtttccgtcaaaacttacttggtaaacgtgtcgattattctggtcgttccgttatcgatgttggtcctacattgaagttctatcaatgtggattaccacgtgaaatggcacttgaattgttcaaaccattcgtcatgcacgaattagtgaaacgcgatatggcttcaaacattaaaaatgcaaaacgtaaaattgatcgtcaagatgacgatgtttgggatgttttagaagatgtcatcaaggaacgcccagttctattgaaccgagcacctacattgcatagacttggtatccaagcattcgaaccaatcctggttgatggtaagtcaatccgtcttcatccattagcttgtgaagcttacaatgccgatttcgatggggatcaaatggcgatccacgtacctttatctgatgaagcacaagcagaagcaagaatgttaatgcttgccgctcaccatattttggcaccaaaagatggtaaaccaatcgttacaccttctcaagacgttgttttagggaactactacttaacgcttgaacaaaaaggtagtctcggcgaaggcatgatcttcaaagatacaaacgaagttttaatggcttatcaaacaggtcacgttcatttgcacagtcggattggtttgtcagttgttgatatggataatcgtccattccctgacgaacaacgccacaagattatggtaacaagtgttggtaaagtgatgttcaacgaaatcatgccaactggcttcccatatttgaacgaaccaacaacagataacttgatgaatggtgtgccagataaatacttcatcgataacggtgaagatattcatgactacctctcaagtgccccagtgatcttaccatttaagaaaggcttcttaagtgatatcatcgcgcaagtcttcaaggtatataaggttcaacggacatctgacttattggatgatatgaagaccttaggttacgttcaagcgacccatgctggtttaacagttggggttgccgatgttcctcaattacctgaaaaacaagaaattgttgatgaagcccataagaaagtcacaacggtttctaaacaattccgtcgtgggttgattacagatgaagaacgccatgcgcgcgttattgaaatctggaacgatgctaaagacgatatccaacaacgactcacagattcgtttgatccaacaaacccaatctcaatgatgtctgattctggtgctcgtggtaacatctctaactttacgcaacttgctggtatgcgtgggttgatggctgctcctaatggtgggatgatggaagttcctgttacatcaaacttccgtgaaggcctctctgtcatggaaatgtttatgtctacccatggtgcccgtaaagggatgactgatacggcgcttaagactgccgattctggttacttaacacgtcgtttagttgatgttgctcaagacgttatcattcgtgaagaagattgtgggactgatcgtggtcttctcattcactcaattcgcgaaggtaatgaattaatcgaaccattgtatgaccgtcttgttggtcgttgcgcaatgaagaccattgttaacccaacaacgggtgaagtgatggttcaacgtaaccaattaatggatgaacaacttgctcaagctgttgttgatgccggtgttgaagaagtcacaattcgttctgtcttcacatgtaacacaaaacacggtgtctgcaaaaaatgttacggtcgtaacatggccaacggcgaagaagttgaagttggtgaagcagtcggaacagtcgcagctcaatcaatcggtgaacctggtacgcaattaaccatgcgtaacttccataccggtggggttgccggcggtgaagatatcactcaaggtttgcctcgtatccaagaaattttcgaagcgcgtaatcctaaggggcttgcaacaatcactgaagtaactggtgaagttgttgcggtggaagaaaaccctgcagaacatacacgtgaaatcactgttcaaggtgaaacagatacacgttcatatagtgtgccttacacagccaacgtcatcgttaacgaaggcgacatggttcgtcgtggttctaagttaacgggtggttctgttgatcctaaacaattaattaaagtccgtgacgtcttatcaactgaaaactacctcttgcatgaagttcaaaaagtttaccgtatgcaaggtgttgaaatcggcgataaacacgttgaagttatggtccgtcaaatgctacgtaaagtccgtgtcatggatccgggtgatacagaaatcttacctggtacattaatggatattagtgaatttacagaccgtaaccacgaaaccttaattagcggtggcgtacctgctacttgtcgtcctgtcttgcttggtattacgaaagcatcattggaaacaaatagtttcttatcagccgcatcattccaagagacaacacgtgtcttaacggatgcttctatccgcggtaagagcgatccattacttggtttgaaagaaaatgttatcatcggtaagattgtcccagctggtactggtatggcgaagtatcgtcatatggaacctaagacagtcggcgctgtatcagaaaatgtctactcaatcagtgacatcgaagcacagatgaaagaagaaacaaaagaataactgagtgccaatttagaacagttgctctaaattgcacgttaaagggcctcaccgacatggtgaggcccttttttatgtgtttgcaataaacaaaacgattaagacaccgtagctgatatacgggacaaatggaattgggcggcgtccgactaaggcgaggacaactggatggtggagactatcaatgagatatttgattaaacagaggagacaggcaattaataacatggatagggtgacctccaatccaaaccacaacccaagaattgccaataattcaatgtcaccagtaccgatgccatctgaaaagtagttgatgacagataaggtgctgccaatcaatagggcactgagccaatggtttgtcggccagtagtcaataaacaaaggcataaaagccagtaccattggaactgggtatagagctgtatggaaaatatcgactaggctcaacaaataaaggataagcaataaatagccaatctgtggtgtgaaatattgactggctaaacaacacgctaacaagccgccaataacctcactagtaaaaaaatggtgctggattcgagtatcacaatagcggcagtgccctctgagaatgaggtaactgataattggacataagtcgtaccaagcgagggcgtgatggcagaagtcacaccgtgaaccaggccatgtgatggataaaccgagtggccaacgccaagcacaaacagttaaaaaagaggcgcaacacgcgccaataacaaaggttaaaaaatatattaacaaacgtgtcatctcctttatgataactacaaaaaaagggcgcaactttttctgaaaaactggcttatagcacgttgactttcgtagttgtgcatgctattcttgtagatgtgctttttacggaagttttctgatattcagacatgctgactgacgtctaaaaatgcattacaatccacgcaatctaggttgccatttttttatcgtaaaaaaagaaccacctggatgtgtggacttaaaactcaaaaataactttcagatcaaggaaggaggaaccttcaaatgccaacaattaaccaattggtacgtaagggtcgtaaatcaagaacttcaaagtctgatgcacctgcattaaactttggctacaacagtatgaagaaaaaagctacagataatccagcaccacaaaaacgtggggttgctactcgtgtgggtactatgacacctaaaaagcctaactctgctttacgtaagtatgcgcgtgtgcgtttatctaacttaatcgaagttacagcttatattcctggtattggtcataacctacaagaacatagtgttgttcttatccgtgggggccgtgttaaggatttacctggggtacgttatcacgttatccgtggtgctttagatactgccggtgttgacggtcgtatgcaaagccgttctaagtatggtactaagagacctaaaaaataacacacaaaaaaatttgaaaaagtcgattgaagtttaaatgacactgtgtgttacttcaaggacttaaatatcttgaggaggttatcaggatgccaagaaaaggctatgttgcaaaacgtgacgttttacctgatccaatgtacaattctaaattggtttcacgcttaatcaaccgcttaatggttgatggtaaacgtggtactgcgtcaacaatcttatacgatgcatttgatattattaaagaagaaactggtaatgaaccattagaagtgttcgaagaagctatgaacaacatcatgccagtacttgaagttaaagctcgccgtatcggtggttctaactaccaagtaccaattgaagttcgtccagaacgtcgtacaactttaggtttacgctggttagtaagctatgctcgcctacgtggggaacataccatggatcaacgtcttgcacgtgaaatcatggatgctgccaataacactggtgctgcagttaagaaacgtgaagatacacataaaatggctgatgccaaccgcgcatttgcacattatcgctggtaagattaacaaggttggctgttatatgtattcaaatcatataatggcctcttgttgtatatagcttaatattcgagaggagtaatattcacttatggcaaacaaacgtgaatttccgttagacaaaacgcgtaatatcggtatcatggctcatattgatgctggtaagacaacaaccacagaacgtatcttgtactacactggtaaaatccataagatcggtgaaacccacgaaggggcttcacaaatggactggatggaacaagaacaagaacgtgggattacaattacatcagctgctacaacagctgaatggaaaggtaaccgagttaatatcattgatacaccaggacacgttgatttcacaatcgaagttgaacgttcattgcgtgttttagatggtgcaatcactgtcttagatgctcaatcaggtgttgaacctcaaactgaaaatgtttggcgtcaagcaactacttatggtgttccccggattgttttcgttaacaagatggacaaacttggtgctaacttcgattactcaatgacaacattggaagatcgtttacaagctaatgcacatgctgttcaaatgccaatcggcgctgaagatgaattccaaggcgttattgatttgatcgaaatgcaagctgacatctatgatgaagatgaattaggtgctaagtgggatacagttgatgtacctgctgactaccttgaagaagctacaaaacgtcgtgccgaattagttgaagctgttgctgatgttaatgacgacattatggacaaatatttagaaggcgaagaaatttctaaagatgaattgaaagctgctattcgtcaagcaactatcgatttgaaattcttcccagttttcgctggttcagctttcaaaaataaaggtgttcaaatgttaatggatggtgttgtagattacttaccatcaccattagacgtacgtccttataacgctaaaaacccagaagatgattcagaagttgaattgatggctggcgatgacaaaccatttgctggtttagcatttaagattgctactgacccattcgttggtcgtttaacattcttccgtgtttatactggtacattacaatctggttcatacattttgaatgcaactaaagacaaacgtgaacgtgttggtcgtttattacaaatgcattcaaatcaccgtaacgaaattcctgaagtattctctggggatatcgctgctgcaatcggtttgaagaatacaacaactggtgattcattgactgacgttgatcatccattaatcttggaatcaatggaattccctgacccagttatccaagtttctgttgaacctgaatcaaaagaagatcgtgataagttagatcttgctttacaaaaacttgctgaagaagatcctacattcaaggctgaaaccaacaatgaaacaggcgaaacgcttatttctgggatgggtgaattgcatttggatatcatggttgatcgtatgagacgtgaatttaaagtggttgccaaaattggtgaacctcaagttgcttaccgtgaaacattcacaaaacaagcatctgcacaaggtaaattcgttcgtcaatccggtggtaaaggtcaatatggtgatgtttgggttgaatttacacctaacgaagaaggtaaaggcttcgaattcgaagacgctatcgtcggtggtgtggttcctcgtgaatacatcccatcagttgaacaaggcttgaaagaatcaatggcaaacggtgtcttagctggttacccattgattgacgttaaagctaagttatatgatggtagttatcatgatgtcgattctaatgaatcagcatttaagattgctgcatcaatggcattgaagaacgctgctaaacaagctggcgctgaaatccttgaacctatcatgaaggttgaagttattgctcctgaagaatatcttggcgatatcatgggacaagtaactgctcgtcgtggtgctgttgaaggtatggaagcacgtggtaatgcccaaatcgttaatgcaatggtaccattgtcagaaatgtttggttatgcgacaacattacgttcagctacacaaggtcgtgggacatttacaatggtatttgaccactactcagctgttcctaagagcatccaagaagaaatcatcaagaagaacggtggccaataagccgctaatcttaagtgattggtttcgattggaaaaggactcgtcattgcgacgagtcctttttttgtgcgtaaaaatgcgattttacagtttcgtaaatgaaagttcatatttaattcataactggttggtattctgtatacatcagatgaattcctcccaagaaataatctgaaaaggtaaaaatgcttttcaaggtggttagcttttgagcataacatagcgaggataatgagcaacgaaggtgatcgttgtcttcgcgtagttaggcggaaaaagttaccttgaaaagcaagattaaatgaattttcattagacaattcctccctaaagaatccgtctaagtaaagcaccgccaatgagttatagtttaatggtaaaacgaaccggctcatttgaaattcctcccaagaacagtgaatggttttctggtgattgatagagacttgctttcgaaggcgcaaggatttgttgatcattaagactggttcatgcgggttcaatccccgctaactcgatttgccaccgccctggcaaaaaaactcaaactctttttcatataaacttctccaaaaaagggagttacgacaaaaatcacttttgtcgtaactccctttttgtgtttctaggcacggcttactgagttagttttgttttgtaggacgtgttttcaaactgcccatcagacgtttaacctttgcttgttcgatttcgcgggcggatagttgactatagtccgcttcgatagccagtttattgaaatcagctagccgttcaggcattaatgaacctgcatcgattgcggctcgtacggcgcaaccgggttcgctttgatgctggcaatccttaaatcgacagtcctgtgcgagcgtctcaatatcagtaaagactgtcttgagtgccttagacatgctacttgtcatgccgagttcgcgcatgccaggagtatcgacgatgaaggccccgctagcagtttgacaggcttgtcgattggtggttgtgtggcgccccttatcatcgtcatcgcgaatgccgctcgttaaaacggaaggctctttaatgagctggttgatcagggttgatttaccaacgccggatgagccgacaaatgtcacccattgtccagctgttaaatacggtttgaaagtcgctgcaacatttgatgccgtctggccagttgtgatgacgggaacgctgtcgaatgtcacacttgcgacggcgtcaagaaaggttgttagctcagagtcgctgactaaatcggttttactcaaaacaatcaccggtgttgcgccgctatcccaagccatcgttaaatagcgttgtaagcgcgcttcgctgaattcttgattggcggatgttacgatgaaaatcgttgcaatattggctgctaaagtttgaatccatagaatgggtacattgtcccgtcatttaagatagcagatgatcgttaaaagtcaaattagataattgtagctccgaggctgtttttaaaatgcgcgagtgcccattcttgcccgttcggtgtaaaagttgcgacagcagcggctggaattgttagtgggtaatttaagttgtatgccgagactgcagtgtggagcacgcaaatgtcggtgcaaacgccagtcagtgttaacgcgtcaatctcgcgctcgcgtaagaaattatccagattagtgttagcaaatgctgaatagcgattctttgcaaatgcatagacgtgaggatcggtttggtgcttggtgtaccagctagctagtggtccgtaaaactcacggccccaagtattggctagattatgtggtgggaatagggcgctctctggatgaaatggatcatccttgacgtgtaaatcagtcggtaagatgacgtaatcaccggctgctaggaactggttagctaattcgataattacaggaacgatttgctgagcgggtttgccggctgtcagagcaccgtttgggtcaacgaagtcatttgtatagtcgataatcaaaagtgcgttatgggacatgataaggacctcctggaggggatttaagttgctttcagtgtatcaaaacatggctagaaatccacgaatgacgcttgctacaagatttatgaaaatgttatgaaaaactttgataaatcagcaaaaaagggttgcgttatcgggttgtatcttgtaagatagataaagtgctatttccatagcaggagtgcgcaccatggtagtcaaaaagattaccgagtagctaagatgtgagaggttgcgacacacccggccgctttgccatgggcgggcgtgccggaaaaattttcacggagctagtctacttttaaaatagacgaaggagggaaaaacatggcaaaacaaaagattcgtattcgtttgaaagcattcgaacaccgtattttggatcaatcagctgacaagattgtggaaacagcaaagagaacaggtgctactatctctggcccaatcccattaccaactgaaagaacactttatacagtgcttcgttcaccacataagcataaagattcacgtgaacaattcgaaatgcgtacacacaaacgtttaatcgatattgttaaccctacacctaagacagttgattcattgatgaaacttgacttaccaagtggtgtagatatcgaaatcaagctttaattcgtaccaaccaattaaaaatactagaaaagaggtgttaccatgaccacaaaaggaatcttaggtagaaaagtaggtatgacacaagtctttactgaaaacggcgaattaattcccgtaacagttatcaaagcaactccaaacgttgttttacaagttaaaacaaacgaaacagacggctatgaagccatccaagttggttttgaagataaacgcgaagtcttgtcaaacaaacctgctaaaggtcatgtagcaaaagcaaatactactcctaagcgcttcattagagaattcagagatgtcgcattaggagattacgaagtaggaacagaaatcaaagttgatactttcgcagccggcgacgtcgttgacgttactggtgtaacgaaaggtcatggtttccaaggtaacattaaaaaagacggacaatcacgtgggcctatgggtcacggttctcgttaccaccgtcgtcctggttcaatgggtgctgttatcaaccgtgtcttcaagggtaaattattacctggacgcatgggtaacaaccaacgtactgttcaaaaccttgtggttgtaagtacagatgttgaaaagaacgttatccttgttaaaggtaacgtgccaggtgctaaaaactcaatgattacaatcaaaacagctgttaaagctcgtaacaaataatctgagaagggaggattttaccaatggcaaacgtaacattatttaaacaagatggtagccaaaatgggaacgttgaattaaacgactcaatctgggctatcgaacctaacgaaaacgttgtgtttgatgcaatcatcatgcaacgtgcttcattaagacaaggaacacacgctgttaagaacagatcagctgttcgtggtggtggtcgtaaaccttggcgtcaaaaaggtacaggtcgtgctcgtcaaggctcaatccgttcacctcaatggcgtggtggtggtaccgtatttggtcctacacctcgttcatacagctacaaattacctcgtaaagtacgtcgtcttgcaatcaagtcagtactttcacaaaaggttatcgacaatgatttagttgttgtagatgcattcaactttgacgcacctaagactaaagaattcgctgaagtacttaacaagttagacgttaatactaaagcattggtagtacttgaagacggaaatgattttgctgcattatcagctcgcaacttacctaacgtaaccgttgtagctgctgatggtatcaacgtattagacgttgttggcaaccaaaaattaatccttactcaagctgctctttctaaaattgaggaggtgcttgcataatggaagcacgcgatgttattttacgcccagtagttactgaaaattcaatggctgcaatggacgacaagaaatacacatttgatgttgatgttcgtgccaacaaaacacaagtgcgttacgcaatcgaagaaatctttggtgtaaacgttaaaaacgtaaacatcatgaacgttcgtggcaagttaaaacgtcaaggtcgctatgctggctatactaaaaaacgccgtaaagcaatcgttactttaactgctgattcaaaagaaatcaagattttcgaagattaagcaacacttaaatagaataattataggagggtatacacgtgggaattattaagtacaaaccaaccacaaatggtcgtcgtaatatgaccagctcagattttgctgagatcacaaagacaacccctgaaaagacgttgttggaatcccaaagccatactgctggtcgtaatgcacatggtcatatcactgttcgtcatcgtggcggcggtcataagcaaaaataccgtgtcatcgacttcaaacgtatcaaagatggtatcaaagcgactgttaagtcaattgaatacgatccaaacagaacttcaaatattgcattaatccaatatccagatggtatcaaagcatacatcatcgcccctaaaggtcttgaagtaggcatggttgttgaatctggtgtggatgccgatattaaagtaggtaacgcattaccattagctaatattcctgatggtacacttatccataatgtcgaattaaaacctggtaaaggcggccaattggttcgttcagctggtacatcagctcaattattaggtaaagaaggcaaatacgctatcgttcgtttaacttctggcgaaacacgtatgatcctacttacatgtcgtgcaacgatcggtactgttggtaacggtcaacacgaattaatcaagattggtaaagctggccgtaaacgttggatgggtatccgtcctacagttcgtgggtcagtaatgaaccctaacgatcatcctcatggtggtggtgaaggtaaagctccaatcggtcgtccttctcctatgtctccatggggtaagaagacgcttggtaagaagactcgtagtagtaaggctcgttcagagaaacttattattcgtcatcgtaaatcaagataatcaattccaattgaacatgtctaaagccaatgcggcttaaacataagtcacattgaactttttattcgaaggaggtttcataatgagtcgtagtttgaaaaaaggaccattcgcagacgcacacttgctcaacaagattgaagcacaagccgatagcgaaaagaaacaagtcatcaagacttggtcccgtcgctcgacaattttccctagctttattggctacacaatcgctgtttatgacggacggaaacacgttcccgttttcatctcagacgatatggtaggccataaattaggtgaattcgtaccaacaagaactttccatggtcatggaaatgacgataagaaaacaaaagcacgctagaaaggaggatgaactcaatggcagatcaaattactagtgcaacagctagcgcaaaatcagttcggatggcagcccgtaaagtacggatggtagtcgacttgattagaggcaagagcgttgcagaagcaattgcaatcttagaatttacaccaagagctgcttcaccagtcgtaatcaaagttttgaaatcagctatcgctaatgcagaacataattacgacttagatgcagaaaacttggtcgttacagaagcttatgctaacgaaggaccaacattgaaacgttttcgtcctcgcgctaaaggctcagcatcaccaatcaacaaacgtacaagtcacatcactgtagttgtatcagaaaaagaagcataaggagggatatcgcgtgggtcaaaagattaatccaaccggttttcgtgttggcgtcatccgtgattgggacgctaaatggtatgcagaaaaagatttcgcaacattcttacacgaagatcttaagattcgtaaatatatcaacacaaaattagctgacgcatctgtctctactattgaaatcgaacgcgctgcaaatcgcgtgaacgtttcaatccatactgctaaacctggtatggtcatcggtaaaggcggttctgaagtagaaaatctacgtaaagaattaaacaacttaacaggtaagaaagtacacatcaacattgtggaaatcaagaaacctgatttagacgctcacttagtaggtgaaggcattgctcgtcaattggaagcacgtgttgctttccgtcgcgctcaacgccaagctatgcaacgtacaatgcgcgctggtgctaagggtattaaaactcaagttgccggccgtttgaacggtgctgacatgtctcgtgtcgaaacacatgctcaaggaactgttcctttgcatacgctacgtgcagacatcgattattcatgggacgaagccatgactacttacggtaaattaggagttaagacttggatttatcggggcgaagtattacccgctaaagccaacaacaatacgaaaggagggaaataaacatgttagtacctaaacgtgtaaaacatcgtcgtgaattccgtgggaagatgcgcggtgctgcaaaaggtggcaaagaagtcacttttggtgaattcgggctacaagctttagaatcaagttggattaccaaccgtcaaatcgaagctgctcgtgttgccatgactcgttacatgaaacgtggtgggaaagtgtggattaaaattttccctcacaaatcatacactgcaaaaggtgtcggcgttcgaatgggttcaggtaagggtgctcctgctggatgggttgctgtagtaaaacgtgaaaaagtcatgtttgaaatcggcggcgtttctgaagaagttgctcgtgaagcattacgcttggcatcacataaattgccagttaaaactaagatcgtaaaacgcgaggaagtaggtggcgagtcaaatgaaggctaaagatattattgaattaaccactgctgaaatgcttgaaaaagaacaccaatacaaagaagaattattcaatcttcgtttccaacaagctaccggtcaattagaaaataccgcccgcttaaagcaagttcgtcagaacattgcacggattaaaactgtattacgtcaacaagaacttaacaaataataaatggaaaggagctatttactttgagcgaagaaagtcgtaaccatcgtaaagtgtaccaaggccgtgttgtttcagacaaaatggataaaacaattactgtcgtggttgaaacttataaaacacatcctgaatatggtaaacgtgttagatattcaaagaaatattatgcacaagatgacaacaacgaagcaaaagttggcgacgttgtgcgtgttatggaaactcgtcctttgtcacgtacaaaacggttccgtttattagatgtcgttgaaaaagcagttattatctaaatcgttactcaatatatatataagtgacggaaggaggacctataagtgattcaatcagaaagtcgtcttaaggttgctgataactccggtgcccgcgaaattttaactattaaagttttgggtggttcaggtcgcaagactgctaacatcggtgatgttatcgttgcaacaattaaacaggcaacaccaggtggcgttgtcaaaaaaggtgaagttgtcaaagctgttatcgttcgtactaagtcaggtgctcgtcgtgcagacggttcttacatcaagttcgacgaaaacgctgctgttatcatcaatgatgacaagactccaaaaggaacacgtatcttcgggccagttgcacgtgaattgcgtgacagtgatttcatgaagatcgtttccttagcgcctgaagttctataattacagacaaccaaggaggtgcgtatatcaatgttcgttaaaactggtgataaagttaaagtaatcagtggtaaagataaaggtaaagaaggtacaatcatcaaagctatgcctaaagaaggccgtgttgttgttgaaggtatcaataccattaaaaagcatgttaagccaaatgctcaaaaccctaatggtgggattgttgacacagaggcaagtatcgatgcttcaaacgttatgctaattgatccatcaaccaacgaagctactcgtgtaggtttcaaagtgattgatggtaagaaagtacgcgtttcaaagaaaactggagaatcaatcgataaataatcttttggggaaaggaggcactttttacatgactaaccgtttaaaagaaaaatatgttaaagaaatgacaccagcgttgatcgaaaagttcaactacacatcaagcatgcaagtacctaagatcgaaaagatcgtacttaacatgggtgttggtgatgctgtttcaaacgctaagaatttggataaagctgttgaagaattaggtttgattgctggtcaaaaaccattaatcacaaaagctaagaaatcaatcgctggtttccgtttacgtgaaggtatgccaatcggcgctaaagtaactttacgtggcgaaagaatgtacgatttcttagataaattagttaacgtatctttacctcgtgttcgtgattttcacggtgttagtgcaaaatcattcgatggtcgcggtaattatacattaggtgtacgcgaacaattgatcttccctgaaatcgattatgataaggtagatcgcgttcgtggtttggatgttgttattgtaacaacttcaaatactgacgaagaagcacgcgaattgttaacacaatttggcatgccatttgctaaataaaaagggaggtcaatttcttggctaaaaaatctttagttgtaaagaatcatcgtccagcaaaattttcaacacaagaatattcacgttgcgaacgttgtggacgtccacattctgtatatcgtaagtttaagctttgccgggtttgcctccgtgaattagctcataagggccaaattccaggcatgaaaaaagcaagctggtaattataaagagtcaataaggaggttaattccacatggtcatgacagatccaatcgcagactatctaacacgtattcgtaatgccaacatggtacatcacgaatcattagaagtccctgcttcacgtatgaaaaaagaaatttctgaaattttgaaacgcgaaggctttatccgcgattacgaagtgattgaagacgacaaacaaggtatcatccgtgtattcttgaaatatggtaagaataacgaacgtgttatctctggtttgaaacggatttcaaaacctggtttacgtaattacgttaaagctaatgatgttcctaaggtattaaacggcttaggcatcgcaattatctcaacaagcaacggtgtcgtaactgacaaagaagctcgtgaaaaggctgccggcggcgaagttctcgcatacgtttggtaatctaaacttaaaataaggaggtgtcataacgtgagtcgtatcggattaaaagtaatcgaagttcctgcaggtgttaccgttactaaagacggtgaaaacatcacagttaagggacctaaaggtgaactaacacgtcatttcagtccagtgattgaaatgcacgaagaaggtaaccttatcaactttacacgtaatagtgaaagtgatcgtgcaatgcacggtactatgcgtgctaacttaaacaacatgatcttgggcgtaacggaaggtttcaagaagacattggatcttatcggtgttggttaccgtgctcaattgaaaggcaagactttagtattgaacgttgggtattcacatccagttgaaatggaagccccagaaggcgttacagtcgaagtcccatcaaacacaaacatcatcatcagcggtattagcaaacaacaagttggccaattcgcagctgaaatccgtgatgttcgtcctccagaaccttacaaaggtaaaggtattcgttatactgatgaatatgttcgccgtaaagaaggtaaaactggtaaataaagcagcctgagctgttaaacgatattaagaggtgaaaattgtgattacaaaaccagacaagaataagacacgtcaaaaacgccatacacgcgttcgtggcaagatctctggtactgctgactgcccacgcttgaacgttttccgttctaacaaaaacatctacgctcaacttattgatgacgtagcgggtgtgacgctagcaagtgcctcaacattagataaagaagtaaaagcagaaggtactaaagtagaacaagcacaacaagttggcgcattagttgcacaacgcgctgttaaagccggccataaagttgttgtttttgatcgtggcggttacttataccacggtcgtatcgaagctttagctacagctgctcgtgaaaacggactagaattctaataaggaggaaaaccatttatgacttacattgatccaactcatttagatttagaagatcgcgttgtttcaatcaaccgtgttacaaaagttgttaaaggtggacgtcgtctacgtttcgcagcaatcgtaatcgttggtgataaagacggtcacgtaggtttcgggacaggtaaagcacaagaagttcctgaagctatccgtaaagccgttgaagacgctaaaaagaatcttatcaatgttcctaaggtcggaacaacattacctcatgaaattattggtcgcttcggcgctggtcgtgttctattaaaaccagctgttgaaggttctggtattgctgccggtggtgctgttcgtgccgtcatggaattagcaggaatcgatgatgtgacaagtaaaacattaggtagcaaaactgctatcaatgttatccgtgccacaattgacggtttaactcgtatgaagactgctgaagaaattgcagaattacgtaatgtatctgtagaaagcttacaaaactaggaggataactgaacatggctaaattaaagattactttaagaaaaagtgctgctcatcgtcttccagaacaacgtaaaatggtcaaagaatttggcttgaaccgagtaaatagttctgtaatcaaaccagatgatgctgcaactcgcggtgtgattttcaaactcgcacatttagtaacagtcgaagaaattaaagactaatttcaacatatattgcaaggaggtgcgcacaataatgaaattacatgaaatgaaacctaacgaaggtgctcgtgacgttcgtaaacgtgtcggccgtggtacttcttcaggtactggtaaaactgctggtcgtggtcaaaaaggccaaaaagctcgtagtaaagtacgtttaggatttgaaggtggacaaatgcctttattccgtcgtatgccaaaacgtggattcaagaatatcaaccgtaaggaatatgctgttgtcaacttaaacgatttaaatcgttttgaagacggtgcagaaattacttcaactgttttaatcgaagcaggcgttgttaagaatgaattatcaggtgttaaattattagcgaatggtgaattaaacaaaaaattgaacattaaggtaagcaagtattctgaagctgcaaaagctgctgtagaagctgctggcggttcaattgaggtgatttaattgctaaagacactcaaaaacgcatttaaagtaaaggaaatccgtagtaagattttgtttactttaggcgttttgatcgtttatcgtttaggtgcacaaattacggtaccaggtgtgaatgctggtgcattgactaagttgggttcaactggtttgatcccattgcttgataccgtaagtggtggtggcttggcgaactattccatcttctcgatgggggtttcaccattcatcactgcccaaattgtggttcaattactacaaatggatattgtgcctaagtttgttgaatggagcaagcaaggtgaagttgggcgacgtaagcttaaccaagtaacgcgttacttaaccatcatcttagcatttatccaatcgatagggattaccgctggctttaactcactcagtcaaatgggcttggttaaagatccggggattaagaccttcgttagcatcgggatcattttaacgggtggtacgatgttaattacatggttgggtgaacagataacggataaaggcttagggaatggtgtgtcaatgatcatctttgcagggatcattgcacgccttccaagcggtctttaccaaatcttccgcgaacaagtcttgaacgcttcaaaaggcgatatgtggaaaggtgtcttattcatcatcggtttgattattgcagtactcgtgattgtcacatttgtgacatgggtccaacaagcaaatcgaaagattccgattcaatatacgcgtcgtgaagctggtgcaggtgaaaatagttacctaccccttaaagttaacgtcgctggtgtgattccggttatcttcgccagttcatttattatgacacctcaaacaatcttaatggccttccaatcaggtcatggtgcagatacttggtttaaagtattatcagatatcttcagcatgcagactgtgacaggttcgattgtttatacggtgctcattgttctctttaccttcttctatgcttttgttcaggttaaccctgaaaaagttgcggagaacttgactaagcaagggagttatatcccaggtgtttggccaggtaaaggtaccgagaagtatctttctagcgtattaatgcgtctttcaactgtcggtgcgttgttccttggggtaattgcattattaccacaattagcagcaaacctcggtggcttaccccaatcaattggtttgggtgggacgagtttactaatcgttgttggtgttgcgcttgaaagcacacgtcaactcgaagggttacttatgaaacgcaagtatgttggattcattcgataagcaattatcgtttaaaaagtattgaatcctggttttaaataggaggcaaaggcatgaatctcatgttaatgggacttcccggcgctggtaagggaacgcaagctgaaaagattgttgacgcttatcatattccacacatttcaactggtgacatgttcagagctgctatggcagatcaaacagaacttggggttaaagctaagtcattcatcgataaaggtgaattggtaccagatgatgtgaccaacggaattgttgaggaacgtcttgcacaagcagatactaatgtaggttatctccttgatggttttcctcggactcttgatcaggcggatgctttagctgccattactgataaattgaacaaacctttagatggtgtgattaacattgatgttgatcctgaaatcttggctgatcgtttatctggccgctttatttgtaaaaattgtggtgcaacgtaccacaaactttaccatccaactaaagtggaaggtacatgtgatcgttgcggcgaacatgttttcttccaacgagaagacgacaaacctgaaacggttaagaatcgcttaaaggtcaatatcgaaatgaatacacctttacttgattattatgaaaaacgtaacctactttacacggtggatgggaatcaagaaattgatgatgtgttctctgccgttcaaaaagtacttgataccattaaagactagtcatcaactcaagtgatctcacggtcattgttcacgtaaaagcctgactagttgtttaatgacagaattctcagtgcttttaaaaatttaatacttgtgatataatatctcggtatgaccactagcggtgagtgcggagagctctcaccatttttctgtatgaattttcacaaccacaagggggtacttttgcgtggcaaaagatgacgtcattgaaattgaaggtaaagtaactgatactttaccaaatgcaatgtttaaagtagaacttgaaaatggtgcagttattctggcacacgtttctggtaaaatccgtaagaactacatcaagattttacctggagaccgtgtgacagttgaattgtcaccctatgatttgactaagggacgaattacgtatcgctttaaataggcgtaaggatcatatcaaggaggtcagtcgatatgaaagtaagaccatcagtaaaaccaatgtgcgaacattgtaaagttatcaaacgaaaaggccgcgttatgattatctgcgcagctaacccaaaacataaacaacgtcaaggttaatattaattaagcaggaggtgcaagaatggcacgtatcgcaggtgtggatttaccacgtgataaacaaattgtgattgctttaacttatattttcggtatcggaaatacaactgccgttaaagtcttggctgatgctggcgtcgcagaagacgtccgtactcgtgatttaacgccggatcaagaagacaagatccgtgcagcaatcgacaaagttaaagttgaaggcgatcttcgtcgtgaagttagcttaaacatcaaacgtctacaagaaatcggttcttatcgtggcatgcgtcatcgtcgtggattaccagttcgtggtcaaaacacgaagaacaacgcacgtactcgtaaaggtaagaaagttacgattgcaggcaagaagaaataatcagtaaaaggaggttataatttatggcaaacaagaaaaatgctccacgtaagcgtcgtgtgaagaaaaatatcgaagccggcgttgcacatattcactcaacatttaacaatactcttgtgatgatcactgatcctcatgggaatgctgttgcatggtcatctgctggttcattaggtttcaaaggtagtcgtaagtcaacaccttttgctgctcaaatggctgcagaagctgctggtaaagaagccatggaacatggtatgaaatctgttgaagttgctgttaaaggaccaggttctggccgtgaagctgcaattcgctcattacaagcaactggtttagaagttactgctattcgtgacgttacaccagttcctcataatggatctcgtcctccaaaacgccgtcgtgtttagtctgggctacgcttcattttgagacaaactgaaacgtgttcacgtataaacacttctcgttttgaaaggggtaaaagataagaatgatcgaatttgaaaaaccaaacattacaaaggttgatgaaagtactaactacggtaagttcgttgtagaaccacttgaacgtggctatggtacgactttaggtaactctttacgtcgtattttactcgcttctttaccaggtactgctgtcacagatattcaaattgatggtgttttacatgaattttcaacaattgatggcgtcctagaagacgtaacacaaatcatcttgaatattaaaaaattagcacttaaattgcatgttgaagaagacaagacaattgaaatcgatgttaagggtccggcaacagttactgctgctgatatcatttctgatgatgacgttgaagtcttaaatactgatcaatatatttgtacagtagctgaaggcggcaatttccacgtgcgaatgacagttaaaaaaggccgtggttatgttgctgctgatcaaaacaagtcagacgatatgccaattggtgttttgccaatcgactcaatttataccccaatcagtcgtgtcaactatcaagtagaaagtacacgtgttggtcgtcgtaacgatttcgacaagttaacacttgatgtttggacaaacggttccatcagtcctagagaagctattagcttagctgcgaagattatgacagagcatttggcaatctttgtagatcttactgatgaagcgaaaaatgctgaaatcatggtcgaaaaagaagagacacataaagagaaaatgcttgaaatgacaattgaagagttagatttatcagttcgttcatacaactgtttgaaacgcgctggaatcaacactgttcaagagttaactgacaaatcagaagcagatatgatgaaagttagaaatcttggtcgcaagtcgttagaagaagttaagaacaagttatttgatcttggcttaggcttacgcacagaagaataaactgataagaaggagggactccattcatgagttatcgtaaattaggtcgcacaagctcacaacgtaaggcaatgttacgtgatttgacaactgatttaatcatcaatgaacgtatcattactacagaagctcgtgccaaagaaattcgtaaaacaactgaaaaaatgatcactttaggtaaacgcggtgatttacacgctcgtcgtcaagctgcagcattcgttcgtaacgaagtagctgatattcgcgaagaagacgatgctgtaatcgttcaatctgctttacaaaaattatttagtgacattgctccacgttatgctgaaagaaatggtggttacacacgtattcttaaaacagcccctcgtcgtggtgacggtgcattaatggtgattattgaacttgtttaatcacaaaatgatttaggtcatttgatcgatgagacagggcgttatgatgatggaagtactccgagtctagtcctaaggtcatactagcaacacagtatggctttcatcgattgatgatttacataaaataacgtctaattccgagttaaatcggagttagacgttttttgtgttggatatcctttgaataaagggtgactaacgaaagcgctatggccttttatatgataaaataggaacaggtttttgatttgaaacgtgcatggataacataaccaatgcactttaattccaaggaaaatacgggttattaatcatgaatgagcaaaaaataattcaagttgaacatttaaaatatgaatacccacaatctgaaggacatttagcactgaatgatctttctgtcagtatcaatgccggcgaatgggtcgccattatcggtcataacggtagtggtaagagtaccttcgcgaaatcattgaacggtttgttagatttacaatcgggatcagtgacgattgatgggttaccattgtcgttggataacgtgtggactattcgccagaaaattggcatggtttttcagaatccggataatcaatttgtcggtgcaacggttgaagacgatgttgcttttggtctcgaaaatcaggggattccgcgagctgaaatgattgaacgggttaaagacgcggttgaacgtgttggtatgagtgaatacttgaaacgtgaaccaagccgtttgtcgggtggtcaaaaacaacgagtggccttagcagggatcatcgcacaacaacctgagattctgattctcgatgaggccaccagtatgctagatccaaaagggcgcgaagaagttctcgcaaccattcataagttaaaacaagaaacaaacatgaccgtgttatcaattacccacgatattgacgaagccgcaagtgcggaccggatcattatcttagataaggggcaagtgcatgatcagggcacaccggccgatatttttgcatatgggcaacgtttgcttgatttagggctagatgttccatatccagaaaaacttaaagcagcgctaaatgaacgcgctatcgagatgcccacagattatctcacaacggaaaggatggttgagtacttatggacattacattcaaaaatgtaagctacacttatcagccaggcacgccttttcaagggattgggctagaaaatatcaatgtgaccattccaagtggctcctatacggctttgattggtcatacaggtagtggcaagtcgacattgctccaacacctcaatgcactcttaaaaccaacgagcggcgttgttcagattggtgagcgcgaaatcacgcctgagaccaacaacaaaaacttaaaggctgttcgtcaaaaagttgggatggtttttcaatttcctgaaagccaattatttgagtcgacggtgcaaaaagatattgcttttggtccgcagaacttcggtgtccctgaagctgaagcacttgaacgcgctaaagagatgattgaactcgtcggtttacccgctaacgtgattgacaagtcaccttttgatttatctggtgggcaaatgcgccgcgttgccattgctggtgtgttggcaatgaaaccggaagtattggtcttagatgaaccaaccgcggggctcgatccagttggccggcgtgagatgatggcgctttttgaaaagttacacagtgagcaggggatgacgattgtgatggtcacccatcagatggatgatgtggcgaactacgccgacaacgttatcgttttggaacatggcaagctagctaagaccggagcaccacgcgaaatttttgcggatccggattggttaacggaaaaacaacttggcttaccaacaacgactcagttcgcgcaagctttaatgcgacaaggctttgtctttgatcaagtaccactaaccgaacatgaattggccgccttattagcggaacaactaccgaagaaggcggggattggacatgaataaattaattctgggccgatatatccccggtgattcagtgttacaccggatggatccacgggcgaagttattagccagtttttattatattgggatcatctttttagcgcgtacatggcaagcctacgctttattactggtctttacgttagcgctaatcgggatttcaaaaattaaactcgccttctttattaaaggagttaagccgctgttatggctaattctatttacagtgctcttacagattttcttcacccgtggtggtcatgtctattggcagtggggatttctgacgcttacccagtacgggctgattaatggcgtctacatcttcatgcgctttgtattgattattttcatgtcgactctcctgacattgacgacgccgccattgtcgttagcggatgcgattgaatcaattctcaagccgcttaaagtagtccattttccagtgtatgaagttgcattgatgctatcaattgcattgcgctttgtaccaacattgatggatgaaaccactaagattatggatgcgcaacgtgcgcgtggggttgattttggtgaagggaatttattccaacaaatgaaagcaatcgtgccgattttaattccgttatttgtcagcagttttaaccgcgcggatgatttagcaacggcaatggaagcacgggggtaccaaggtggcgaaggccgcagtaagtaccgaattttgaaatggcggacaagagacaccgtggcatttatcacgatgggccttttaaccgtcgcacttttattcttaagataacgcaaaaaggactcagttaaaccaacggaggttgatttagctgagtcctttttttttgcacttttttgattagcttgttttttgaaccgacgtttcaacgttgaagcactaatgccagtttggtaactaatttgagcgtacgtaaagccctcttcacgcatgtctagggctgcttgtatgttcatcatcagtataggtcgttttacgaccttcagtgtaactagggttggtgacacgagcattatgtttcccttcctgggtacgagtgagaatcatatcgcgctcaaattgcgcaaaagcactaaataaggtaaaaatgagtcgtccggaaggggtgtcttcaatgatgcccatgttcaaaatatgaattttaatgcgggctttaaaaagttcttggatgatttcaagtgcttctttggtatttcttgcgaagcgatcaagttgtgtaacaacgatggtatcaccacttgaaacccgatctaatagttcattaaatttagggcgatcaacggtagttccggtaaacttttcgctgtagataatgtcacagctttcttcctttaattgactaatctgggttgctagactttgtccggcagatgaaacgcgtgcgtatccgaacttcattgcacaattctccttatttctacttataataatagttatacagcatttgaacttgttttatattaaaaatgcatttttaaatcaaattttttacgaacattcataaaaagattgctacttttcagaaaattatttagaatagaactactaactttttaacacaagagggataaaatgacacaacggtatcgcgtaacaattgcctatgatggaacggattttgcgggtttccaagtgcaaccgaaccaacgaacagtacagggcacattagaaaaagcactgacaaagatgagtaagggtgcttatattcaagtgtatggttcagggcggacggacgcaggtgtccatgcaacggggcaggtggtccatttcgactatccaggtcaattacccgctattagtatgttacgggccttaaatagcctcttaccgcttgatatggaggttgtggatagtcagttagcggatgatgactttcatgcacgattttcaacggtcggtaaacggtatatgtatcgggtcgatcttgggcattatacgaatccattcaagcgacgttataccggtcattatccgtatccaatcgatgtggaacggattcaagcggcgctgccagatgtgatgggcacgcatgattatacgagttttgcgtcttcaggtggggtcattaaggataaggtgcggacgatttatgatgcgaccgttgttttcaatgaacccgaaaatgaactcgtttttgagttttatgggaacggctttttgtataacatggtgcggatcttggtcggaactttattagaaattggtaacggtcggcgggatgtccacgattttttacggctgtatgaagttaaggaccgtcaacaagctcgctcaaccgcgccagcaagcggtttgtaccttaaaaaagtttattacgaaactgatgaaaataattgagattcaattgacttaatcgtaaaattacgatactatagtatctggtattgtttgccccacgataggccccggaaacttattgagtgtcaaacaaacacagaatattggaggaataaatcgtgcgtacaacttacatggctaaaccaggcgaagtagaacgtaaatggtatgtgatcgatgcaactgatattgcattaggtcgtctatcaactgtagtcgcttctatcttacgcggtaaaaataaaccaacatttacacctaacgttgatacaggtgataacatcatcgtcatcaacgctgaaaaaattaaattaacaggtcgcaaagcaaccgacaagttatatcatcaccatagtaaccatcctggtggtttgaaaactcggactgctggcgaaattcgtgaaaacaacccagaacgtttaattgaaatgtcagttaaagggatgttacctaagaactcattgggtcacaaccaattcttgaagttacacgtatacgctggtggcgaacacaaacaccaagcacaaaatccagaagtcttagacattacggacattatttaaggaggaaactatagtggctcaagtaacttataacggtacaggccgtcgtaaaaactcagtagctcgtgtacgtttagtaccaggtactggtaaaatcactatcaacaacaaagacgttgttgattacattccatttgctaacttgattttagatatgaaacaacctttaacaattactgaaacaacagatagctatgatatcttggtaaacgttaatggtggtggattctcaggccaagctggtgcaatccgtcacggtatttcacgtgccctattgacagttgaccctgacttccgtccagctcttaagagcgctggcatgttaacacgtgaccctcgtatgaaggaacgtaagaaaccaggtcttaagaaagctcgtaaagcaagtcaattctcaaaacgttaatcaaaatattgttatatcaacgatgcaaccaattctttggtgtcgtttggtgttaattgttatgataaatcgtttaatagacttaaagcatcagcatcttgctggtgctttttttctggcattaattcaaggtaataattttgagtagttaaaattgaattatgaccaagtcttctagagatataatcaatacttatatcttttgaaaatagaaaagatgcatgggtatctcttagaccatgaaaggtagtttttgtaatatctaactgttttagtaatttttgaagttgttgagattgcctgaaactattccagtcgaagatatattctgatttacttttggctaatgtgataagtggattgaagtcaatatttgagacagattttaagagacattcagaaccgcgtttaccttccacagctcaaataaatcattaatcgcaattaataacttatttgaaccttggaaagcattaaatcaggcggccatttggctcgtaagtgttgcaatttgaacttgtaagggggtctggtagcccagtgaactatgaattctcttcctattgtagaaagcatgcacatattcaaaaaggacggcagcggcagtttcataatcttcaaagaccggcgcattgcaacaatccttaaaaattttgcaatctaatagtctcgacctactggattatttaaaagctcgtagtttagagaaccccttgtttgaggtcgggtccgtcgaagcctgtacaaaagaattcaattttgatcagctagcggctcacggaacaggtaatttatacgattatttgttggaacaagtcggttatcggtttaaagcaggtaaattacagcaacttttgcaacggctgattttggaggttgaaccaaatggctatttaaaggtggatgaagcccgttttatccaagaaaatcaaattgatcagaccacttatcaagacgttgtgacgttactacaacaacttgatccaatcggggttggtggtcgtgatgcacaagaagtgttattactacaggcctctgctatttatccggctgatgatcttagtattttggtgataactgattattttgaacaattattagctggtgatattaaacaaattcaaactcagttagccattagtcaagatgacatgcaatcgattttacacaaaataggtgcactgagtcttgaaccaggaaatatgtttgatgactcaccaactaattttcaagtgccagatgtcattattaagatgaatggctcacgatatcagctactattgactgaatttgggcgaccaacgctgatttttgaacatgcaagttacgcgcagttccaaaaagaagtcgatgtcgctaccaaacaatacattcagcaaaaatatgccgagtatcagatgttaaacacgagtttgcataagcgcgggcaaacattattaatggttgctgaagtcctaatcaaggcacagtgggattatattactggaaaacaagcatatcctaatcaattgattctacgggatatcgcaaatcaattgcagctcagtgaatcaacaattagccgaacgattaaagaaaaatcaattcggacgcctaatggtatctatcttctgcggaatttgttgaccaaacggagtacaactttagaggaaggtcccaccttgacacagacgcacattgcaattcaaacagttgttaaggaagaagaagcccatcatccattgtctgatcaaaaaatcgcggaccagttaaaagttaagtatgacattaaagttgctagaagaaccgtcgctaaatatcgtcaagaattaggtattgctaataaggcagaccgtaaataagcaaaaaagcaatggatgcagttaatattactgtatccattgctttttaggttcttataaaattgccatcagtttaaaccagtccaatacaagtgggacccactgagctgctacagtattagcatattctggtttgcctggtgtttgagtcacatgattagcaagcgaaaggccatgaacaccagctccaaagagatggtattcaacagggattttatgttgctgtaatgcaagtgtatatagaagtgaattcgttgctggaacaagggcgtctgtggctgtttgccaaataaaagctggtttagctgctgctgtgatatttttttgtgcgtgccataaagtttggtccactgtaatctgttgcttagttgcatcatcaattggaaaaccagcgtcaaaatcaatcacaggataatttaagacaatcgctgcatgatgaccacggtaatcgtctaacccgtaatcagctcggtggattggatcggtcgcaatgccattataggtagcgaccacatgtccaccagctgaaaaaccagtcaaaacaattcgatccaaatcaatatcatattctccagcttgatcagtcacccactcaattgtcttagcaagctgatgtaaagcgagcggataaacggtttcagtcgaacttattaattggtaggggagaacaatcacgtgaaacccttctgctaaaaatcgcaacgcgaccggtgttgtttcacgacctgaatgatacgtaaaaccaccgcctggacaaataatcatgacgggatgtttaactggatgctcgaaatctggaatgggtgttaaccaatatgcatcaactataaatgcttgttctttaacggataacgtttgacgttcgatcgacattattaaggacctctttctattatattaaccgttttcaatctatgttaatcttaccggataatgacaaaaaataacagtattaagcatgactttttgatactaaccatttaaaaatctcattaagtaaagtatgatagttttagaggaaaacgtaatgatatcaggttatacagctctttacggcttggttgcgcatccagcgcaccatagcttgtcacccatgattcataatctgggttttaaacaacatcaaatcgacgcgcggtatctggttttcgatagccaagcacggccgcaagatgtcgcaaaagcgattcggacgcttggtgtggcaggcgttaatctttcaatgccctataaacagtcgcttgtgccattaatggacgagttaatgccaactgcgcaactcgttggcgccatcaatacggttgctttacgatcgggtaaattggtaggcacgaatactgatggcgatggtttttggcgcgctttgcagaaaagatatcccaatctagctagtcagcagattgttattctgggtggtgggggcgctgctctcgcggttatcgaagccgccgctcgctatggtgtggcgacgattcaggtcttcaaacgtcaaaatacgacttatgcggtggttgaacaacgactggcaaaaattgctaatcaccattcgatgtccatcgtgctacataattatgccgatgaacaggcactccaacaagcactcagtaatgctgattgcgtgattaacgccacgaatcttggcatggtcaatacccctggattaccgctggcagcacctttaattggtcaaataccgatgacttgtttagttgccgacttaatatatgcgccacgtcagactgcttttttacagttagcggctcgaagtggtcatccaacccaaaacgggcttggcatgttagttgaacaggccgcgttgagttttcaattctggacgggccaggtcctacaaaccgatcccatctatcatgctttaacgaaggagttttaataatttatgattattcaatttaaaccaaatactgattcagcgctgattgatgatttttgcgcacgacaacgcacgacaaatccgaatgtctatcagattaagcaccatgtagcggtgatcggtgcaaaagcaattgattttacccaagcagaggaagaagtcattgcggcaaccaccacggatgaaccgagttacgtgcttggcagtcggctattccaacccgaaaacacggtcatcgaattagcacacagtacgattggcggtgcagacttcacggtgatggcgggtccttgttcggtcgaatctgctgaccacattatggcgatggccaaagttgctaaagaaggcggtgcgactattttgcggggtggcgcgtataaaccgcggacatcaccgtattcctttcaagggatgggcgaagctggtttgaaagcattgcgcaaggctgctgatgcttatcaaatggacgttgtgaccgaagtgatggatgaaacgcatgttgatttagtggcgcaatataccgatatttttcaaatcggggcgcgcaatatgcaaaacttttcattattgaaagctgttggaaaaaccaacgttcccgttgctttaaaacgtggcttagcagcaactgttgatgatttattaaatgctgccgagtacattgctgccaacggtaatcaacaaattatgctgttagagcgcgggattcggacgtttgacaatcactatacgcgcaacacatttgatttaaatgctgtcccagttttacaaaaattaacgcactatccagtcttaattgatccgagtcatgcgactggtgaatgggatcttgtgacgccaatggctcgggctggagtcgcaactggggcaagtgggttacaagttgagattcatgatcatccagaaaaagccttttctgatggcgcacaagccttaaagccagctacttatcttgaaatgtgtcatcaagtgtgggccgttgatgcagtcgtcaaacagtggcggcactaatggtgataattgatgtccacctcacacaaaaaaattatcagattcggatccaatctggtttgtatcacatctgtgctgaacaaatcgcgcaagtttggacacctcgtcaaatcgcattaatcacagacacgaatgttgccccgttgtatttagaaacggtcgaatctcaattaatccaagttggctatcaagtcacaccgattattattccggctggtgaaacgtcgaaatcacttgaccaagcaatggcactttattcccaactggcagcggcgaattttacccgtcatgacggggtgattgctttaggtggtggggttgtcggtgatttggcggggtttatcgcgtccacctatatgcgggggattgcatttattcagatgccaacctcgcttttggcacaagttgacagtagtgtcggtggaaagactgcacttgatttaccagctggcaagaacttagttggttctttttaccagccggatttagtattgattgatcccgactttttaacgtcgctgggtcaacgccaattactggccggttatgcggaaatcgttaaagtggctgcactcaacggtgggacattttggcaacaggtgacagggattcaaagtgcgcatatgattctagcgcaggctgaaacactaattcagcaaagtgtgcactacaaggcacagattgtcatggccgatgaaaaagaaagtaatcaacgccaattattaaattacggtcatacgattggccacgcggttgaaaccctggccaatggcagcctgatgcacggtgaagcggtcagcatcgggttagttgccatgcagcacttagtcgaacaaagtggactgactgaagcgcatttaacaccagtgattacaactgttttaaatgcggtcggcttgccgacagatagcccgttacttatgagtgatcgactcttcacgcaacttttacatgataagaagaatcaaggagatgccattaatcttgtttacctcgatgcaattggtgttccaaaaattcaatccataccgctaacgactttagcggctaatctattttcaaaaaaaaactggtaaccaacccacagataccttacaatgaaactaacttgtaaagagtgtttaactgaccgtatgtgcggagcagtcttggaaccaacaatatatttgaaatagaaccataggggttgattgactagatgcaactgattttaatcggttttatggggtctggtaaaacgaccattgcacgcaaagttgcacatcattaccattgtgactggattgatttggatcgctacatcatgcaagaacagcaaatgacgattaacgaaatctttgccgaaaaagggcaggctgcatttcgacaaatggaatttgaggccttacagacattgatccaacacgatgggattatcgcaaccggcggcggggtcgtggatgatgctcagacgcgccatttacttgaacagagtcatatccccatttttttcctaaatgggagttatgaagcacattggcgccgcgtttcgcgcaatgatcggcggccacttgtgaatcaattgggccacgatggtttacgcgaactgtatcacaaacgacgaccaaagtattatcggcttgcggactacaccatttttttccaacataagacaccgaacatgatgttggcagaaatcgatacgcagctacccaggattcaaaaaaagttggctaataaacattagtcagcttttttcaatggtcgtagaatcatattattcgctttttaacgccatagacttgtatgatgaggttataacaaggagggtgaacaatgacatttaaattaccagcactaccttatgaatatgtggccttagagccgtatatcgattctgaaacaatgcatctgcatcatgacaaacatcataagacttatgtaacaaaactcaacgcggcgctagccaagcaccccgatttagcaggtaaatcattacatgatttgttaacacacatcgatgatttacctgagaatcttcaaacacctgtccgcaataatgctgggggccatgccaatcatagtttcttctggcgaattctaacaccgaatgcgccagaagcaccaacgggggaattactcgaacggattgaagcccgctttgggaagtttaagacgttccaagaagcattcaccgaagctgcccttggtgtatttggctctggctgggcatggcttgttatcgatcaaaatggtgaactacaaatcatgacaacgcctaatcaagattcaccacttatgagtcgtaatcgaccactacttggacttgacgtttgggaacatgcgtactacctgaaataccagaataaccggattgattacatcgaaaacttttggaagatgatcaattggccattggtagcggaattactttaataagggtgttcattataatacatttataactgaataaaataagacccatcacttaataagtggtgggtcttattttattttacacaattgtaaacactgtcatcacaattatagagcgatttattcttaaatgtaatagttgtagttatcattattgacatttttaatattaatggaataattatagaaatcattagggttttttaatagacaattttcagcagtccatgctaatctgaatatgttataaaaataataatacttttaggggatgagactatcaagaatgtaatcggaattttagcgttaggaatcctaacaactagcaccatcagttctatacaaacagttaaggctgaaccaagtgacaatcaccaaaatttagcgagtagcgtgctagcagatagcctcaaatccaagggaggcaccagcaaactctaaaagcaccacaagaaatgaaaacctatattggtcgtggtgatgtttttaaagaaaaagaccggcaacgcagaacattacgctactcaagtttagagcctagcggtttatacgcccaaaaaggggatgttttgacagttgctcaggggatgcaagattcattatctatcacaattggttcgcccgaacgagaaactcaaaaacaatatccattaacaaagggcattacaacgattaccgttgaaaacgagggcccgatttatgtgactaatcctaatgattctggtgaagcaacaatcacaatatcaggggcaacaggatcaatgccatatttcgatttaaatcaaactagcgtcgcagactttgagaaacaaatggcggaaatgacgaatgctaaagatgtgcagttggtcagtaacaaagcattaattacagttagttacgcaatggctaaaaaatatctcggtgaccctaaagaactgatgacttattatgatcggtttttaacggcacaagatcgggtttcaggcattactactgaaggaaatccagtaaactttgttgatcgccatctccaacatttcttagagtcacctaagttgtatatgtatacagaaaatgaatttatgggcttccataatgatcgcgctttgcaacgactactgaagacaaatgaaggttggggcatctggcatgaaagtggtcatcagagacaacaaacaccttggaaatggggtgctgttgtagaatcaagtgttaacatttatgcattagcggctcaaaaagaattgactggtaaaataacatcgttagatcaatactacccagaaatgcatacttatctaaaatctgataataagcaattcaacgcacaaaataataatttaaagatggttatgtttggtcaattaggaaatacatttggtgataacttttaccccgttttacatcaatactatcgtgaaaacaagcttgcatttggaccagacaatgaacggatgcaaaactttgttctaaatgtttctagaattacgggttataatatgcagccttatttcgaacaatggggatttgatatttccgcagcagttaaagctgaaattagtcaattagcacctttaccagaagctatttggttaaatgataaagaaactaataaacagttacccatgcgcttaatcgacaccgtatcgctgaatgaccacggtattcaagttaacctgactgactaccaaaccgatgtatttaaggatgagcaattaatccttaaaaagaatggacaagtgatttccaaactcgtcaataaagagccaattgaaagtatgttaacaaataatgtttgggaaacaatcgagatgcttaaaccgactgatgtgattacaattgaacagcaaaataaaaatggtacttttaaatgatatgaacactcaattgatagtattgcacttgaagaagagttattaaactatttgaatgcatcagaaccgattggtacaattctaacccaagctaaactagatgctctccgaaatcgaattgatgctcttccttctacttttgactataaagaaagactcttagaactatttacaaaattagaagacaaatacctagctacattagtcaaagatattcaactggattcacaatcagcattagtggtatcgtttactgatgagaagtttaaagactatgcgaaaattaaggtacttgttgacgaccaaccagttgcagaggtcaaaaatggtatcagtagtggtggtcagctcgacgataatgtcttaacaattcctaaccaagcggatgcacatgttgttaccgtagtggctgaattaccgcacaagtcttacattctaaaaatgattagtcaggatattcttcttctgaaacgtcaagttgaagcgttatttgaaacaaacgatcagttgaaacctgaggtcacacaagacctattagattaattacgaacacaaattaacgcagttaagggctcggaaaagacgatattgactcaaagaattaaccatgcacagcaactgttcttgaacactttagttgctgacatgagtgttaaaaataataaaatcgtcgttacctttgctaacgaattatttaagcattataagatagtcgtattaggaaacaacagctatctggcagaagtcaccaatggccaaaactactatggttccctaaatggaaatgtatttactccttctaaatcagttgtccatggacatccttatcgggtagaagttagacacgcaagtggaacttacaagattagagagatgattgctgagtaaataaaatggtcccacatcaaaatacgatgtgggaccatttttatctataaattactatccgttgtaaagttgagtggtgataggttcgcgctatccgtaatcagttttgcggtgaggcgttccatttcgtgttgggcaagttgcgcagcttttgcagagcccttggtcatcaacatcgttcgttggaccgcatcggtttcagcagcaaccgcttgatcggttgttacgatattttgaaccattaagctattgatgtgtttttgcgtttgttccaagtccttggcgaacttggcgtagtgtgcatccaccaaaataccagctaatttataggtccagtagatcgaatcttgactgtaatcctttgtccctttttggtaattgactgggacgtcattggcacccgcatagaatggtacgtagacactttgtgccgtgacacccattgataaccagtgaagcccgctgacatcgaccggtaagttagggcgcatttggagaatgtgtgattcttgcgtctttgctaaactaattgggcggaaagcatgtttttcttgtggtgtgccgtgaccgattggatcgtagaccgtgccttcataatgcgagcctagaattcgcgcgacatcttcgacttgaatgggcgcatcggcttgccgtaagaaggggaggttaaagtcttgaggttgttgtgcgacagatggcgttaacaatttttgaccgtaccaaacgcgcggtgtgttgtaaacaaggtcgctttggtctttggtcccaaagatatcgcggaagttaaatggcgtatcagcttgccataggtgattatcacgcacaaaatcttgaatcccgtctgaagtcatgaaccaatccggttgatcgaattgcacttcttgaatcgcgagttgattggcaaccacggcatagctatcatccggaatccgttgggcaacccagtgatgtccactgccgatttcaagataccagacctcatcgacatcggaaaagagaatcccgttactttcagtggtgccgtattcactaacgatggcgcctagccgcgcaacaccttcacgggccgttttcacgtaaggtaagacgactgtaatcatggattcttcagcaatcccgttgtcgatgtaggggtcaaagccgagaacgcgactgttgctataagcactttcggtgccgctcatcgcaacgccgtattcgttaatgccgtcttcttcgaatagtccatattcatcggtccattcgggtgtcgccgtgtattttgcggcttcaagtggtaaatcgattgaaaaacccgtgtcttttgagacaaagtgcggggcagtcgttaacttttgatggggatggatggttaaatgtttaggccaagctgcctggctatcttcgttacgtgcgattaaagttgagccgtctgcagtggctttcttaccaactaaaacactggtacaggccgtcaattgacggtaaaggggttcactcattgtaatgcctccatagataaatcaatattagctattattatacattcttttgcttaaaaacacagtaattaccgttgctcaattgcgttaaaacaggcataatataagtattcaattaaaggaggcaccacacatgccattagtacacatcgatttaatcgctggccggagccaagcacaattaaaacaactctgtgcagacgtcacagaagcaatcactaaaaacacaggcgcacctgcagaacacgtgcacgttgtcctaaacgaaatgcaaccagaccactactcagtaggcggcgtgctaaagagcgacgaaaaatagagtgcgacgtcagatggtcatacgctgaggattagtctaataccgtgaatgagcggcgtagccgatcgtttgcggtatgtaactaaccggaagtgtatatctgacggagcacgtttcagaatagagtgtgcaataagccgggtatcttctgaggattagcctaatcaggcagattaccgacaaaatcggtgatttgacggatgtagctaagcacagaaagttagcttgaaaagcacgtttcatccatcaaaaaaagcgattcgaccagaaattgtcgaatcgctttttcattaatccatcttaaaatattgccgtaaataattggccacaccatcttgcgcattcgtcagtggtgtgatgttgtctgcaatcgccttgatcggtgcaattgcgttttgcatcgcaaccccggtaccggcataggctaacatatccaaatcattactttcatcaccaaaggcaatgatatctgattgatcaatgtcgtagtgtgccgctagttttgcgaggccggttgctttgtgaatcccatgatgcacaatttctaagacgctagcaggaccaccccaagtgttgacggaaacgtcagggaattggcgcagaatttcagcacgtaacgcatcttgatcagcgcgttccacaaaaaccgtgacggccgctgggtcttgccgaagcgattcgcgggttaaaatttcatcggacttcaacgttgtggggaagaaagaaaacgtgttggcataagcttgatcagctaaaaacatcgttttaccttcggcggcaatcatttgaatcttaaagcgttcttttagttggaagagactaaagacaatgtctttattaatcgtatattgatattcaccggcccaggcttgtcccggaatgtgcattaaagccccattaaagttaaccattggcgacgttaaacctaattgttggtagaaaggttcactcaaacgatttgggcgccctgtgacaatactgacaatgtggccagcgttttgtaattcagttaaagtttgttgcgttttaagtgtaatttgggcatctgaattgagggtagtcccatctaaatccagtgcaatcaatttttgatgcatagcggcgcctccttttaaaaacgtgtttggttaaaacacgatatgtctttttattctagggggtatgcggattgttgtcaatgatcgtcagttgtaactggtcggttgaaccagtataatagagctattagagtgaccaggaggcaggacacatggcagaccaaccacaagatgatgcagcaattgaagacttaaaggaacggattctagccgcgctcgagaccgtgattgatccagaactcgggattgacattgtgaatctcggcttggtttacggtttaaacctggatgaaaatggcttatgtacgattgatatgacccttacaacgatgggctgtcccttaaccgatgttttaacggattcgattcatcaagcaatgggcaaaattccagaagtcaatgaagttaaagtcaatctcgtctggtacccagcgtgggataccagcaagatgtcccgttatgcacgcattgcactcgggattcgttaaaacgttcgatttggccttccgattgggaaggtttttctaatcgtctaagagaaacttatattagaaacggaatccattatgatacagttaagttatccagagaaattgcgccagagtcaacgtttttttgcaaccgtcccagccattcaagtacaaattcatgctgttttaactagtttattgcagattgaacaggacggcttgcccatacataatttacccgttttgggaattgatgaatctctgtatttagaaatattactccaggttgaacagggggcttttagcgccgctagtgtggctgaggttcaacgtcagttacagttaatcgaccacttactgcgcaattaccgtgaatatttgcaaaatcgctttggcatgtgggcctatatcactacagatttgacggcggcgattgtccgcgagtttcccaattggcgttttctagaagtcatggctggtaacggctatttaagtgctggtttacggcaggcaggcgctgatgtgatttgtaccgatagtttagcctggactgccgagaatgaaacagggcgccaattagtcacgtcagtggcagctcttgacgccaaacaagcggtccaaaaatatggtccgcaagtcgatgcagtcttaatgtcctggtcacccaacggcgtcccagttgattatgaattgctgcaacaacttcgtgcaatgccaaatgcccccattttgttgtgcttaggcgaacgttttggcgccacgaatagtcacgccttttggacggcggcccattatcacaacgacgcccgtttatcacggattaaccgttacttacgcccattcgatttaatgcgtgatcggttttactggattcaatagtctgctttaaaggagggcccactgtgcgcctgaaaaaaataatattagattgtttactagttggtttaacagttctaggcatgttaacgattagccaacgtgcaaaaactaactatagccaacgcttaaatcacaatagtttatcagaaaatgctgtgatttttaattctaagagtcaacagtcgattcaaaaaaccattcaaaaaattgatgccgcgaaattaagccattttcaaattcaattcaacgttgattcccggttctcatatgtctatgcgaaagggaagttatcgagtgtcccattaaaagacggccggttcttctccagttacgatttcaaatcacagattccagtcgtcgttgctggtcaatcacgacttgctgaactctacaaaccagctagtcaagcgtattatcaagatcatggtcgctacttatccgtgattggcgttgtcggtacgaatcagacaactacgcttgatcagcacatttttgtatccacgtcaccagaatttgtattaaatgatcgcccactgaataaagtcaccgtattggttgatggtccgcagatgggagcgcatctgaaaacttaccaaaagattttcaaaacgactaagcacagttatttaacaccgaagacgacgccgttagtcggcgtcaactggctccgtcaaaatgcgggtgtaatcgcggtaattgccgtcctcatgatcatcgcggtcggtttcacttatttatttagccaagttatcaatggttatcacgcacaaaaagggctcagcactggtttatatcgtaaattccgcgtggcacaaacccaaatttttgcgctgcacctagttgttagctcaatcattggcttctcaattggtagttggttcttttacctaacgggtcgaacagcgatttttattggattgatgatcattgatctcatcttaatcggtatcttttattatttaattccaaaaggacgaaaaacaacacattaaaaaaacggtttagtcattagattgactaaaccgtttttttttaagggttaaactttacgccgtggttcaataaaaacagcgcatgcgccactgataaatacaagactgaatagagttgtaaaccaatctcgaactgctgttaagcggtctggcacaaaagtcataaataaaatcatcgataataaacacgctgcaaacatcgttttaaaaacgcgatacataataagctgtgagcgttcatccgaacgtccaattctagttataccatagtagaaaaacagaattgaaatgatgattaatccgattgccacaccagcgattacatgggcattttgatttaaaaagtgtagcagggccatattgttacgcctcccgataagtgaatagaacgtcaattggtacatcaaaaaatcgtgcgagcttaaaggctaaaatcaaactaggtgagtagttgcctttttccattgcatagatggtttgcttggaaacaccaaccgcttgacctaatttttcttgagaaagatgttggagtactcggtattcatagactttattttcgacataattcgtttctttcaatatgcaccacttcattatcaaagtttacttatacttttaacaactatatttttacattatccaagttaatttgtcaagtgctttagcgaatatccaaatttaggcattactgcaaattacagtatccaacatcctgttgtgcaacctgattataataagttccccaagttgccattgcgttaatcatgggactcagtgtttgaccaaattcagagagttggtattcagtctttaacggccggagactaatcaccattttagtaatcacatgatccgcaattaattcttccagctgtagggctaacatgcggcgcgaacaatcgggtaaagcgcgcgtcaaatcaccaaaatggagatttgaatgttgcaaaagttgataaataatcacacttttccatttacccgagataatttgaagcgtgctttcaaccgggcagcccgcctgacaatcataaatgtgccgttcttgaaccatgaaatggcctcctttgataccgccattatagtccgctagcagtcatttgcctagtgaaaacaatgtaactagttacattcgatatacgattgttacggggcaattaatgttttagactaatggtgaataagaaagaaggcatttttaatgcaagcaattggttttaccaaacatttaccgattacaaatgaagaaagtttaatggcttttaatctccccagtcccaaaccaaaaccacacgatttatgcgtacaagtgaccgctgtttcagttaaccctgtagatgttggcgttcgaaaagggggtagaggacaatcaaaaacgccccgtattcttggctgggacgctgttgggattgtcacaggaattggcaatgccgtcacgttatttaaaccgggtgatcgtgtcttttatgttggggactttaaacgaccaggtagtaatagcgaatatcaattagtggatgaacgaatcgtcgcaaaagcaccgcagaatttaacggacgcgcaagctgccgcgatgccgctcacagcgctgacggcttgggaagctttatttgagaaattacacattgattttgaagatcgaaccactaatcatgatcaaaccatcctaatcattaatggggcaggtggggttggttcgatcgccacccaactggcacatttggccggattgcacgtgattgcgactgcctcccgtccggaaacgcaaaagtgggcgctggcccatggtgcggatcaagtcgttaaccatcatcaatcactcattgaacaggtgcacgcactcggctatcaaacggtcgattatatattagagttgaataacatcgatcaacactgggagagtatggcgcgcctgattaagcccaatggccgcatcgcttcaatcactgaaaatcatcgcccggtcgatttacaaaaattaactaaaaaacgggtcgagttcgcttgggagtgggttttctcaaagacctactatcaaacaacggatttagcgagtcaaggcattatcttaggacagattgcaaccttattggaacaaaacaaattgcaatcaaccctgacaaagtgcttaagcccaatttcagcagccaacttacggcaagcgcatcaactggtcgaaacgaaccaaatgattggcaaagtcgtagttgctaattaagcaatcaaataaagcccggtagaagaaatccttctaccgggcttttgctgcttaaaatgttatgtgccgttcattcaaataatgccgtaattcaggcgagagaataattggcgccttttggagcgcttgaatatcgcgtgcgccaagcattgccataatctcttgaatctgcgcttgccaagtgagcaagttttccgccatttgtgtcgggccttcttttaaaaccatgtgcaagaattgaccggaaatcccaacagcactggcaccaagccgaagtgctttaatgatatctaggggattccgaatcccacctgaagcgaggatgttgacgtcattttggaaagcgcgtgattcaaagagcgattcgaccgttgattggccccaatcagctaagtaatcgtaggctttatcatgacgccgttcgttttcgatcgtgacaaagttggtcccgccacggccagaaacatcgatgaattgtacaccgatttgcttgagttgcgcaatcgtatcagcactcatcccaaaaccaacttctttcacgataacgggcacaccaacattggcgacaatgttagcaatctcgtctaaccagtagaaatcttgatcaccttcaggcatgacaatttcttgtggcgtgttgacgtgaatttctagggcattggcttgggtcattgcgacggcttgcttagacacattcaaatcattaccagcaccaatattagcgagtacaaacccgtggggattgaattcgcgaatcacgctaaatgtatccgctagtgacggatctttaatggctaccgattgggagccagttgccattggtaggttggtaatttgggcgacttgcgctaattgtgcgttaattttctttgtctgctgactaccaccggtcatgccgttgatataaaagggactggcccagttagtcccggcaaaatcggtactgatatccacgtcggataccgcaatttcgggtaagctttgatggataaaccgaatgccatcaaagtcattgatggcatcaccatggcggaatttttccgctaaaaagacatgttcatctttccgatgagattgaatggattgtttgggtctgaccatgggtaagctcctaatctacgaggtgaactgcaaggttcaatcgttcaatttgattggcccgccattgttcaaagagggcctctgtttcgatagcgcgatcaataatgacaatcccacaatcaccaccgccagcaccagatgttttggcagcaccgccgattgtctcggctaatgcgcccattttctgtaatattggcgtttcaatagcgacgtgactgaagtgagcgagatcttgtaaaatggcacgattgtggcgtaattcagcttggatctgggctaaatcattacgacgaaacccttcgaccatcgcttctaagcaagctttgctagctgcgaggaagttttgataatcggcttgccgttctgttttagcaagggcaattttatccaccaagtgcgaggttgaagcgggcgaccccgtccaaccaatcaagagtgacaactctgctggcggtgttaataattcgattgaaagactaggccatggcatttcgagcagctccgttagactaacagttggtcgaatgtcagcaagccattgtttatcaaatgaccgataagcgacccagccaccaaaaacactagcagcaatgtcgcctaaagaaccgttgccctgcacatctaaatgcgcaatagcagcaagtttatacaattggtcgtttgatagtgataattcataaaaggcgcagagcgcttttaccgttgcaacggttacggcggctgaactgcctaaaccgtattttttaccatcagcagagtctaaatcactatttacccgtaggtggtagacgcgcagtgtcttacccgcttgacgtgcgtattgttccgttaagcgaatcgcggacaaaatataatggaagggattatcgcggttatcaaaaaccatttcatcaccttgtcgttgccaataaagggaattttcttggtattgtttagacacaatactcccatattcatgactctcttcaattgtgactgtcacaaattgatttaaagccacgataatagccggaaaacctgtttctactactgcgtattcgccagcaatatacagctttccgggcgctttagccgttatcaaaccatcagaacctttcacgtttaacttaaatttgcattatcgatagctcacaccaggacctggtttagcaacaaggagttgttcaggactaaaatagggcgcaagcgccgctaaaatctgaggtgtttcctgactggtacaaatcactttcacgtttggaccagcatccatagtataatagcaagaaacaccctgttggcgcaaggtctgcacgactttaattgcttgtagggtttcaggttcaaaataggtgaaaggtgggacggcactaagggttgtcgcatgcatctgcatcgcactttgttctgctaattgccccaccaaatttatatctttcttaacgattgcggccttcattgccggaattgcggcttgagcggtttcaacccatgctgggtagtagggcgacgtggccaccgtattcgccatcccagcacgactggcgatggctttttgacgatcatttaagacaatcgcaatcatctggatgtcccaatcaactgtttcttgaacgggaacagcgtatgaatccaaatcattggtcccacgttgccattccacaaaaccaccataaatcgagcgggttgcagagccagaaccacggcgggctaatctcgaaagatcccgatcgttaagttcaagcccagctgcacgactacctgcagcagctaatgccgcataaccggaagcagaagaggccaacccagcagcattggggacatgattaatggtttccacagcagcaaataaaggcagatgcgcctgttttcgaattaaatcgagaaactgactcatctgcgtactagttttggtatccgcaatggcaccattaaagctaatttggtcagcagtcaaatcagttgaaaagcggaccgttgtatctgtataaaaatgatctagcgtcattgaaagactactgttatacggaataatcaattccggattttgttttccccaatacttaatgagcgcaatattcgtatgtgctctggctgtaattgattgtcccatagtaatactcctaattttttttaaagtgcgtgtagtggttgaatccaagttttgatggcaccagctgctgataaggcttgtgccaaatcatccgcagcactttgcgtagcggccagggcgataatgcagccaccacggccaccacccgttaacttagtgcccaaactaccggtctgattagccacatcaatcaaatgatcaacacgggcattgctgacaccgagtgcccgcaaatcaagttgagcacggttgaggttcgcgccaagtaccgttaattcgttttgggcaatatttcttgcgacttgttgcgttagataacccaaatggtcaattaagggttgcgtttgttctggattggacatcatttgattctgaacgcttttgacggcggcacctgtttgccccttttgaccgctgtcggcgattacaagatacccttttaaattaatgggtaggggttgaagcggctgccctttgacaaaccataatggtgtagttgcgccggttgtcgcggcgtcaatcccgcttggattaccgtggattaaattttcggagagcgtggctagctttagtagccgttgttgactgagctcttgatgataagtcgcaaataacgctcgaatgatggcgacggccgttgcggctgaagaacccatcccgcgttcgggcggtaagtcactttcaatcgtcaattcaaacggggttaagttcggatctaatgcatgccacagttgttcaattaaccggcgaatgccttgcatctgaccaacagcctgttctagaggaccattgtaataagtactcttaatttgcggtgtctggagtgccggctcgagagttaccgttacccgcgcttgaaccgcaaagatggggagggcaatcgcaggttgtccataaacgacagcgtgttccccaattaaaataattttcgcatgactttggccaacaccagtctgcatacaatcacccttaatctctttttctgacttgaagatacccttactactatactgcaaaacaaaaatgatcgccacataaatcaaattgggcacaggttaatgggtttcctattatacccgctttttaccaacggactagccggattttatcccaatcacttgtctatctatggtaaaatgacgccaaaggagtgtgggcgccatgagcttaaaatttattattggtacagctagttatgaccaccatcaaacactagtcaagcaactacaaacagaccttaaggccaccaacacggaccgctttttttatttggtcccgaatcatatcaaatttgaatctgaagtcgcacttttaaatgacctaaaaacccctggaagtgagtatgtcgcaacctcacgcgtccaagtcttctcattaagtcgattagcttggtatttcatgaaaaataccccgtactaccagattccgcggatttcaaccgccgggttaaacatccttgtctaccgcctcttgcaagaacatgcagaagaactcagcttatttggtggggaagtcaatcaaacaggctttgttgctcaattaacgagccaactattggaacttaaagtgggctgtattacacccgatgagctaactgagattgcggcccagctagcgcccgaagaagtcgaactgactactaaattgcgggaaataaccattattgccacggcgtttgaagccgctatgcaaaagcaattcatcgaaaatacgacgttaattgatgccttaactgattatttaaaaaaacaagacttacacgattgtcatttctatatcgaaggtttcgcacaattcacggctcaagaacaagcgctagtcgccgtcttaatgcagcaagcaagcttaaccgtagccttaattaccgactatgttaattaccaacaaccaccggaaaaactcagcttcttttatcaagctgagcgtacgtattatcaattataccaacaggccaagcaaaatcacattcccatcatgactgatcagattgccactaaccagcgggtttcaccaacgttactcgcgcttgatcggtactgggttgcttctgaaaaccacggtcagatcccaacagcaccggaaatcgattcgacgcaacttcaagtgatcggtgccgaaaatcggtataccgaattacggtatgttgcccgtgaaattcgtcgtttagtccaaaccggccactatcgctaccgagacttcttgattatgactcggcatttagccccttatgaaacaatgattgcgccgatttttacagaatacgaagtgccgtacttctgcgatttaccggaaacaatggcggcccatccacttgttgcgatgttggcagcgttgtttgatgtgaaagagcattactaccgctatgaagatgtaatggcgcttttgaagacggagcttttaataccagatgactatcaatcagtcgctgaattccgggctgatcttgatttgtgtgaaaatctgattttaaaaagtgggtatgaagggcatgattggttaagcgcagccgattggcaatattatcggttcggttccttccaagatggtgttcgaacaacagaagatgaagtgctcacggaacggatcaatcggattcggcattatgttcaatccgtattaccaccattttataaacggttagacagtgccaaaacagggcgcgatgccgctaaagtgctctatcaattcttaatcgaacaaggtgtcgatcgacaattgttaaattggcgggaccaagcactcgcagccaatcaaattgccttagctggccaaccggaacagacatggcaaacatttatgacgatgttggatgaatatgtgacgttattaggcgaccaacctttcgaactaaagggcttttgggatttactagcggccgggtttaatacggcgcaatatgcgcaaattccatcgacactcgaccaggtcgttttatctgaatcagggatggtgcagactaaacgccgcaaaattacctttatgattggtgcgaccgatcaagtgatgcctgatcagattgaaaccagcgccttattatccgaccatgatcggcaactattaaccgatcggttcaattcagaacaattcttaactgatccaagtgccagtcagatgagctttgaaccttatctgaactacttggcctttttaagtggtactgaaggattgtatttcacttatccattgaataatggggaaggggcgaactacacggtatccccctatgtcgaccggattaaaaactacttccatttaaccgagcaacgcgttctagcagaagtcattccgacaagtacagcgccaattacgggttcttggcgtagtttgttaagcgatttgattcaagttgcgcgacaagcacaagcgacgcaaacactaattcctgaccaatggcagactgtttatcgtttattacaacaatttcctgttagtcactacttaaccaatcaactccttcaaagtctggcgtaccataaccaacccgttgcactgacaagcgatattgtcactgggttatatggcaatgaaatccatacgtcgatctcgaaattagaagagttctatcaaaatcaatacgcttatttcttaaaatacggcttaaaactgaacgagcgcccaatttttgaactgacacctgcaaataccggtgatttctaccaccaagtcttagatcaatttatcaagatgattcaagcccaacgcttagtcttacccgatctcgataatcaacaaatcgatgcattgacggatgaaatcttacaaaaagcgtatgaacaaccagaatttaagatcctcaataaatcagcacgaatgggctacattcgccaacaattgagtcaaacaattaaacgcgtcagccggacattgcgcgatcagagtcaacgaacgaacttaaaaccgttggcaaccgaagtcttattcggccaagttggtgcccaacaaggattagctggtctagaattcgaattacccaatcaacgtcgggttaaggtgcgggggaaaattgaccggatcgatcaactgacattaaacgaccaagcctacctgggaattgttgattacaaatccagtcaacacagctttagcttccgcgatgcatactatggtttggcattgcaaatgttgacataccttgaaactgtcttgcaagatcaagcagcaattttaccagcgcaaagcaaggtaaaaccagccggggccttttatctgcaccttcaaaacccaacaatgtcattgaagcaactgaacaaacaaaaactcgctcaactacaaaaaggcgaactcgatcaattattactggatcaatttaagtatgatggcttaattttaaacgatgagaccttactcgaaaacttggatacagctttagaaagtggctattcaccactgtttaacttcaatcgtccaaagagtggggcattcaaatcgaaacaactggtcacccttgatgagttacagcaattaattgcccataacgatcaactaatcaaagcagcgggggaagcgatttttgctggcgaaaatgctttgaatccgattatgcggcccgaccgcacgaatgcactcacaatgtcgccatataaatcgattttccaattcgatgcgatgttaccagaaaataattatcgccaattaagtgcgcttgataatcaagccgtcttagccaaaattatgaactcggaggaagaacgacatgagtgatcgccgatttacaccaacccaacaagcagccgttgatcacgcggggcatgatatcctcgtttctgcctcggcgggctccgggaagacaaccgttttagttgaacgcgtgattcaaaaaatcttgaatggcactgatgtggattcactattggtggtgacgtttaccgaagccgccgcatccgaaatgcgccaacggattcaaacggcactgcgaaaaaaagcaagcgaggcaaccgacaaagcggtgcaacaacgcttacggcagcaactcagcctagtcccgaccgcacaaatcagcacgttgcatgcgttttgcttacaagtcattaaacatttctactacgtgattaagttagatcccgcgtttcggttattaagtgatactgcggaacgtctcttattagaggatcaagtttggcaacgcgttcgcgaagaacattaccagtcaaacgacgccttattttatgatttagcgcaaaatttttcgaacgatcgcaacgatgatgggctaaccaacattgttttcgaactgtttaacttctctggtgccaatccagcgcccgatgaatggttacaatctctaaccgccccttacgaggtaccagagactggcctaacaaccagtgcttatttcaaaacaacgattctgccaaagttagaagcgaccttggcaacctgtttaaaagacttggcactcgccaacgaactaagtcaaacaaacgagaaatttgcggtatacttgccaactatcgcaacggcacaagcagcactaactgccattcaagccaacgcggccactttaagttgggcgcagtggcgcacacaattgaccgacgcccaattgggacccgccaaacgaactaagaaattagaacccgatgaacaatatgacaaggaccggatcaaaaacgccctcgataatgtcaaaggggcactaaacgatcttttaacaacctattttgtctttgacgaagcacaaaccagtcagattcaacggcgcgctggtgagttagtcggtaagttagtgacggttacccgcgattttaagcaagccttccaagctgagaagaaacgccgctatttactagattttggcgatttagaacatttctgtttggatattttggccggtgacactccggaatcagaggcagcacgaacgttctatcaaaataaattcagtgaaatcctggttgatgaatatcaagatacaaaccagttacaagaaacaatcattcaaactatcgctagtcaagcaccccgcaacgtcttcatggtgggggatgttaaacaatccatctatgcctttcgattagctgatccgagtttgttcctcggtaagtacgacgaattcaccaagccagataacgatagtgaacgcattattctcgcagaaaacttccgttcacggcgtaatatcgatgatttcgtcaacttagtctttaaacaaatcatggaccgccaattagggcagctagattacgatcacaacgctgaattgcaatatggtgcgacttattatcctgacgatcaaccaactcagccaactgaattacttttatacgaaacaaaaccgactgatgaagaatcaacgggcaagcttgataaagctgaaggtcagattgcatcagttgcacagcgaattaaacgaatgattgataatcaagaaaccatctgggatcgggatacgcaagaaatccggccaattcgctatcaagatattgtcttattgacgccaacgcgcaacaacaacctaatcattcttgattatttccaacggttcggcttaccgattgtcattagtgatgcgcagaattatttccaaacaacggaaattcaaatcatgctatctttcttgaaaattattgataatcccaatcaagatattccactggttagcgtgcttcggtcaccaattgtcggtatgaacgaaaatgaactcgcattaatccggattaatgataaaacggatgactattaccaagccgtttttaattatcttgatcagttcgaagcacaaaaatccggccaactcggccaacaagtcttcgaaaaattaacgcatttccaaaccttattaaatgagttacgagccattgcacgtcaacggccactcgttgatttaatctggacaatttaccaaaagaccggctttttagattacgccggtgggatgccagcaggtcgccaacgccaagcaaacttgcacgcactctatgaacgcgctgcgacttacgaagcaaacggctttaaagggctcttccagttcatccaatttatcgaacgtttgcaaaaacaagataaggatttagcccaaccaaccagtctcgccaatcaagatgccatctctgtgatgacgattcatgggagtaaaggcttagaattcccggtggtctttctaatggatgccaatcatcaatttaacgagcaagacttgcgccaaaattacgtgctcgatgatcaatcgggactcggaattgtttacttagacgcgaaaaaacggttaaagattccaacactaccagaattaaccatcacgacccaaaaacggcaaaagttacgcgctgaagaaatgcgaaaactctatgttgctttaacgcgtgccgagcaacggctgattatcgcgggcagttgtgataaccaagcgaaactatttgcaacttggcaaaaagggcagcaaaatcctgatctgcggttggacgcttctgttcgtcaagctagcacgaacttactagattggattggattgagcttaattcgtcatccgcaagcccgtgattggaccgaagaggggacaccattcctacctctgagcgatgacgcaactgaatttaatttaacgtttacaagtgaaacgcgccttggcgaattaccaggtgttttacaccatgatcaagattggagccagcaacaacaagtggcactcaaggcggtcgatttaacaactgatttagccaacgggattcaagaccagctaacattcagttatccagcaaaaggcgccaccgaaacgacagcttaccagtctgtttcagaagtgaaacggctctttgaagatcccgacaatgatcagttggggcaattacgctttgacgctgatacaccgcaacaaacccatcgttacgtgaccgatgaattacctcaaccacaattcatgcagactgttcgaaaagcgagtccggctgaaattggaacggcgacgcatctggtcttacaagaaatcgatttaacccaaccagtaacgatcgatcgggtgcaaagtgtcatcgaccgacttgttttacaaaaaagcctcactgccaatgttgcacaacaaattaaagttgctgctatcatgacattcttcgagagcgagttgggtcagcaactgttagctgaaccagcgcaagttcatcgggaagtcccattttcactattgttaccggctgcatccttattcgccggtttacgcccagaagatcaagacaatgtcttaatccatgggattatggatggttatgtaaccacggataccgactgtattttgttcgactataagactgattttgtgaacccagctgatccagaagctgccattgaggcgattaaagcgcggtatgccggccaaattaacctatacagtgccgcgttgacgcaaattgctaaccggccggtaaccgctaaatatctctatctattgtcgattggccaactagtcgctattaactagactggtttctacgcgtcattcatagtatgattgatataataatgagtaaagtattggtgacagcatgaaccaagagacaatttatgccgtcgttgatttagaaacgactggcacaaacattaaagaaggggaccgcattattcaattcggatgcgccctcattcaaaacggcaaaatcattcagacgatttcgcaagatgttaatccgcttcgcgacgtaccgactaaaattcaacatttgacgcatatcactgctgatcaactcgaattagcaccgattttcgaagatttagcgccaacgttagttgaactcttatccggtactgttttcgtggcccataatattaactttgacttaccttttttaaatggcgaattagaacgcgtggggcaaccgccacttgatttgccgggcatcgatactgttgaactggctcagatcgtattgccggaagcaccgagctatcgattacaagacctcacacagttactcgccatcgaacatgacaatcctcatcaagctgacagcgatgccttggtaacggctaaattattcttaaaattaatggcacggctgaagaccctgccattagttaccctagaacgtcttagtgcgttaggcgcgggcttgttacgtcaaacaggggatttcttcacagcgattgccgagcagatgcatgcgcaatcgagaccgctgccgaacgatctcttaattcgtgaaaacattgccctacgaaaaccagccgaggaatcatttgaaatctatccgggatctaattttgcggctgattatccagtggaagaagctgataaaaaacgattattaaaaccccacttgaaatggcgtaaagcgcaagctgccatgatggatatgattcacgataatttcgaatctgaggcacctgaaccactattaattgaagcagccaccgggttagggaagaccatcgggtatttactcccctatagttatcgcatgacgcctgaacacaaattagtggttgcaacatcgacaacgctgctacaggatcagattttaacgcaggccagaccgcttcttaaaaaattagtaggtcgccaaattaatgccgaaatcgttaagagtccgcgtcactatttggatttgcatcgctttgaattatcgctccgtttaccacataagaatcggatggtgcggttgcttcagatgaaaatcttagtttggctaacccaaacaacaacgggggatttggatgaactcaatttaacgagttaccaaacaccatttttcaataacgtgcaacaccggggattaacaagtctgcaaccacaagcgccgttttatcaagatgatttcttacgtcgcctgcataagcgccagcaacaagccgaattactcgtcaccaaccacgcctacctggcagagcacgcgaatgatcaccaaacctggggtgcgcgaccatacttggtcttagatgaagcacaaaatatgattttcaatgttcaaaaaattgcgcaacaagattggtcactttcacgttggcaactttggtctcaaaaagggttgcaatatacggatccggaacaggccaataataatttagcccggcttttcccgaaaaaatcatcgcaagcacgctcgttacggttagtgcataaaaacttaaccaagttaggccgaaccatcagtgacttagagacatacctaaccacagcgtttgaactaccgcaaccagaagcgcatcaagcgtttagtgaacgttatttgaattcagatgaagtggttcaatttgtcaccgcttgtcataatcaattcgaccaactgaaccgccaactgttgaccattcaagatcattttctcgcgttgcgttactggcttgaacagcggttagaacaatatacagagggggatttggggatttggcagtcatttgaaaacgaaatcaacctattgttggcggatgttgaagcctatcaacggtttgagcaattattcattgcgacgaaaccgcaggaacaacacgcgttaatgattcagatgacacagcctaaacaacctagtcagttaccacagtttaagctccagtggcaattgctttcagctggtccgcaaatgcaacagatcctcgcgcactttgaaccagtcaccttgactggcgcaacccttgcggttaatgggcacttcgattatttgaaacgtgaacttggttttaccgaagcgcaaccactagcgactaagaaattacgcagtccattccgcttcaagcaacaggcgcgcttttttatcgctgaagatggtcctagtcaaaagaatttagcccccaatgagtaccatcatgcagttgctgaacagctattaacgttattagttggcaatccgcatcaggcgttagtcctctttaattctaatcaggcgttagaacaagtgtattatgcgcttggccgcgccggtttatcgcttgatcgtgagattcttgcccaagggattacgggtagtgcggagaaaattaccaagcgctttatgctggggcacgattcaatcttgttggcgacaagcagtttcattgctggtgttgattttccggaatcagcactggaattagtggtgcttgttcaattaccatttgatgcgccgaatgcactgcagacacgaattcgttacgctcaactttctgcccaaggaattaatccatttaaagcagaggctttaccaaaagcaacgattaaactacgccaagcatttgggcgcttaatcagaacccctaacgatcgcggcgtcttcatttgtttagatccccggttattatcgacccaatatgggcaacaaatgcgccgcgcgttaccgacaagtttgccccaaaaagcagcgtcggttaaaataatccgggaattaaccgacttgttttggttaaattcccactaagattcggttttaagcgccgatagccgttattttttgctataataaggcttattcaagcgaacaaggagagaatgcagcgtgcgcaaatataagagatggctctggatattcttattgttggtaatcattggcagcatgctgatgatttatcatcaagctcgaaaacccgaagcaacggctgaaaccaaagccgttaacattgctaaaaaatacgcgaaattaaaagagcctgatgggttctacacgtatcatcgaaatgcaacatattataccgttagtggtaaagaccgtgataatcacggcatcttcgttttaatcaacgaaaaaggcaatcatgccactgtctatcgtcaaagtggtggtatttctaaaaacgatgcgttagaaaagacatggtcaactaaaaatccgcaaaaagtactgaacattaacttcggtatgtaccgcaacaagcctgtttgggaagttgtctataaaagtgacaaaggccgtctttgttatttaaccctcgattttaaaaccgggaagacgattcaattgattgaaaatatctagggttctcaattagggggctgtggttgtcagggttttgttatataataataactatcagttattttgaactgttgtaaattaaatgttgcacataaggagacagagtttatggttaaaaaaatcagtattatcgatgcaaaaaaccatgtcgatgaagaagttaaaattggcgtttggttaaccgacaaacgttcaagtgggaagatttcattcctccaattacgtgatggcactgcctttttccaaggggttgtcgttaaaagccaagtaagcgaagccgttttccaattggcaaaagatgtcaaacaagaatcaagtatgtgggtgacaggggtcattcatgaagatactcgttcacactttggttatgaaattgaaatttctgacatcgaattaattggtgacagcagcgaatacccaattacacctaaagaacatgggattgaattcttattagatcaccgtcacttatggttacgttcaaaacgcccatttgcgatcatgaaaatcagaaatgaaatcatccgcgcttcttatgaattctttaaccaagaaggcttcatcaagatggatccaccaatcttgacgggtagtgcccctgaagggacaactgaattattccacatcgaatatttcgacaacgatgcttatttaacacaaagtggtcagttatacgctgaagctggcgcaatggcctttggcaaagtcttcacttttggccctgttttccgtgctgaaaaatccaaaactcgtcgtcatttgactgagttctggatgattgaaccagaaatggccttcacaactcaagatgaaagtcttgaagtccaagaaaaatacgtggcttaccttgttcaaaacgtcattgatcactgtgcctatgaattaaaattattggaccgtgatgttgaccaattgaagaaatatactaaaacaccgtatccacgtatttcatacgataaggctgttgaaatgttacaagcagctgacttcgatattaaatggggcgatgattttggcgcaccagatgaaacttatttatcggatcaatttgaacaaccagtcttcattttgaattatccaaaagccatcaaacctttctatatgaagccacatccaacacgtgatgatgtttacttatgtgctgatttattggcaccagaaggttatggtgaaattatcggtggtagtgaacgtgaaactgactttgataaattagaagctgaaattaaagcaatgggcttagaccttgaagaatatcaatggtacttagacttacgtcgttacggatcagtgccacattctggtttcggattaggtctagaacgggccattacatggatctgtggtatcgatcatttacgtgaaacaattccattcccaagaatgattaacagaatcaaaccataaagagtgctgactcgaacgagttgactttgaggattaacagcaaaacgggcattatggcgcttcacagccatggtgcccgttttacagttaaccggaaaaggcagttcgaagaagcacgtttcaaatagagtgcgttgtagctggttaggttctgagcattaacgttggttggcgaataatcgatgcaatcgattatttgacaatcattgttaagcgcaggaacctagctacaaaagcacgtttgaattagagtgcgttgaaagtggttagttctcgagcatttgtctagtctagtgaatgagcgacgcaagtcgatcgtttgctggacgtagcaaagcaccgaggactactttcaaaagcatgtttcaaatcagagtgctgactcaaacgagttggctttgaggattaactaaagcgccgtgaaccgaaatcaggttctcggcgcttttttatttgtctaaaattggttacaatagaactaatgaaacttttagaaaagaaggctagaatatgaacgaacttaccgcgtttttacaaggcggccaattgagtgtctctcgactgttactgcatcactatcaaacgctcaagatgtcttctgaagaattagtggtttacttacagctcagtgattttgccagtcaaaacaatgactttcccgatttagctgtgattggtgaacgcatgggaattgaatccagccaaatttacgcattgattcatcaacttttacagaaaaaactaattacccttaaatcatctgtcaatgaacaaggtaaggctgaagaccattacgatctcacaccagccttaactaaattgagcgtgctagccgttcaagacgcacaagtcactcaacaagcactagacggtaaccaacggagtgcggtctttaaccaagttgaacaagctcttggccgcccattatcgccattggaatctgagattgttgccaactggttagatttagatcattatcaaccagaattgattcaattagccgtgcgagaatccgttttaaatcaagtctattccttgaagtacgttgataagatcttgctcaactggcagaaacaaaatattactgataaagaatccctacaagcttaccaaaaggcccatccaagacgttaatcgaataggagatgaagcggatgttatcaaaagccaaaacacagtgggccatgcaccaactatacaatttaattccagatgcgcagggcgcattagttgctgattcaccgtttcaattgttgattgcggtgatgcttagcgcacaagccaccgacgtttccgtcaataaggtcaccccacaactatttgctgatttcccgacaccagctagtttcgcgaatgcagagattgccgatattgaagctgatattcattcaatcgggttatatcataataaagctaaacacattaaaacatgctgccaacaactaatggcagattttggtggggaagtgccgcgcacacatgccgaattggaacaacttgctggtgttggccgtaagaccgcgaatgtcgttttaggtgacgcctttaacgtcccatcatttgccgtcgatacgcatgtcactcggattgccaaacggctcaaaatcagtgcacaggatgcctcggtgatccagattgaaaaggactttcaagcgaagcttcctaagaaaacatgggttcaagcgcaccacacactcattctttttgggcggcaagtctgtacggcacgtaagccgcattgcgatgagtgtcccttattaaggatttgccaagcaggccaacaatttcttgaagatcgtggttaaaaaacgcaaaaaaagcaccgttcagccaacgtttatcgttgaactgaacggtgcttcttttagttagttggcgctgctggtgtttgtgtcgtcgaccccgttcctggatgttgttgccggaggggttgaggtcgaaggttgcgattgtgaactttcagttggggtgcttgaagatgaggtctccggcacactggaagattcacttggtgtttcaaccacgctacttgagctagaaatttcactgcttgagctgaccggtgcttctgagctagagtagagtacactacttgaagaagatcgactgcttgaagaacttggaatggtcgtcgtccctttaatatagagttctcgtacgccagccacgtttttagcaaccacgttacttggcattgaccaatctgagttggttgcgttttgagcgaggtaggccatcattgctttatagatataagcggcgacgttccgctcacccattgttaatccatttttaagtggttcatcgtatccagtccaaaccgtcactgaatagttcttggtataaccggcaaaccagctatccttcgctaaagttgggtttaacccagatttggcaatttcttcgctagaataatcggttgtcccagtcttaccagcttgatgaagccctggaatttgggctaacgtcccagaaccatttttaataacatcttttaacatatcagtaatcatgtaggccgttgaactcttcatagcctgtgtgccatcagaatcataattatgcgtaatcccatcggctgtttcgactttatggatataagttggtgcatagtaagttccaccgtttgcgaaggcgccatatgcggcagcttcatcaacagttgaaacattcccaccaatcccataagaaagaccagtatcagctggcacgttaatgcctaagcctttcacgaattcacgggctttagtcatgccaacagcttctaacagttcgatggctgggacgtttcgtgagttggcaagcgcattacgcgcggtaattgtaccgagataacggccatcaaagttatgcaattgaatattggttccaggataagtgtaagggacatcttgtagtttctgtgcggttgagtagtcaagatattcgatagctggaccgtaatccattaatggtttcattgatgacccattacttcggccagattgcacggcccggttataaccgagctgcacatcaccagttttacgaccaccaatcatcgcaacaattcgaccgttattaggatctgtaattgaaactgctgtttgtagctgatcatctgggaatggaatactgctatcattattgacgatatcgtataacttacgttgcgcgtccatattgatattggtgtagactttcaaaccagccgtgtacggatcatagccttttttcttcaagtcggcgaggacttccttgacgtaagcgtcggttgctttagaatccgttgaactattcgctactgtttgttgatccactaagccggtattaattgggacttgtttagcttcggcagcttcagttgctgtaatcttattgttccgcaaaagcgcatcaagaactaaatcacggcgcttcttcgctaaatcagggtggaggtacggatcgtaattacttggcgattgcggcatacccgcaatcaatgccagttgtggcaaacttaattccttcaacgacttgccataataatacttagcagccgtccccataccattgaccccgttattcaggtacactttgttcatataatactctaagatttggtcttttgaatattgacgttcgacttgaacggcaagccacgcttcttgtgcttttcgtctgaaagtctgatcgctgtttttcgttgagaatttagacagtttaatcaattgttgggttaaagtactcccaccttgtaagcccagcggtgatttaccagtaatattggcgactgcagcagacgcaattcggattggatcaatcccgaatttttctttatagaaacgacgatcttcaatagagactactgcatcttttaatgtttgcgggatttgatcactcttgacataactccgattttcgccaccaattgttttgaaaggtttcccttgatcatcgtatagaattgtcgcattcggactttgcaggtccgcttgcgttaggtttggtgtatctttaacatagtaggcaaacaaaccaatcccagccacgaaagccactacaatcagtagtaacagccattttagaattcttaaaaagaggggccggcgtttcttattagcgggttttgcttcagctttgtgccttgcaactcgcgaattattattgtttcgattatcggacattgttctttaaactcctttatttgaccgctttaataactgatctacggcatctaagtagggaataattggattaagttggtacttaatctcaatcccattgtcaatcacatcactgagtgaaatcgattttcgtgcaccatcaacttgcgcgtcccagcggctaatcagttctgttgcgggatacaagaatagccgttgtagcgggacaaatttcataatgacaaagcagatgccaccttgattcaagcaggctctgaaatgttcaatctgatgttgatggaagttccgaaacggaaacgcggttttattcttcgtttccttcgcttcaaaatcgacgtaacggccctgataaatcccattatagtcagttgttgaggcttgtttaaaataagcttctttaataaccgcttggctgcgggcagggtagtcgaccttcacaatctgaattggcgttggtttcttatacacgacagccgttgcatgtaatcgataatactgattactatcattgagttcttcttccaacgtcatgccgcgtttaccaaataacgttgttgcttctggttgccgggcttgctttttagttggttttgtctcattatttgtataaggctgtccgttaggataatgaaaggccattgaaaatcacactcctgtttcactattatagcaatgtttagtttaattgaaaatcatttgggagggacctgacttgaaacgactatgggtgagcggctatcgaagctatgaactcggtgtttttggcgaaactgacgagaaacttaaagtaattaaatattcattaaaaaagcagttaacacaatatttagatgatgggctcgagtgggtgatcactggtggccaaatggggattgaacagtggagtctgcaagttgctattgaactaaaaacggactatccggatttaaaattggcgatgatgttgccgtttaatgattttggtcagcaatggaacgaaaataaccaagctcaattgagtcagctcaaagcgcgagtcgatttttgcgaaccagtgattaacgcaccgtattctggaccgcaacaattgcgccagtatcaacaattcatgctgacccatacggatggtcaactattatactatgatcgtgaatcaccgggcaaaccagaatatgattatcatgcagcccgccaatatcaagaccaacaagattatccgattaacttggtcgattttttcgaactacaagatatcgcgactgagttagcggaattagatcagcaagagttttaattatccgataactttgctataatgggaatcatagtacatttattctaaatgaggtgtcaaaatggacaatcaaattgaaatcgaattgaacccaactgatatattgaaaaaagaatttaaaacaaaaatgcggggctatgaacctgaagaagtcgatggttaccttgatttagttattaaagactatcaaacttatcaagaagcaatcgatcggctaacggcggaaaatgcccgcttattcaagaaggttgacgaattaaaccgccaactcagcgcttctgataacgtgaaggaaagtgcaccacaacaagcttcagcagcaaccaactatgatattttgaaacgcttatcaaaccttgaacgccacgtgttcggtgctaagttaagtgaacaaaatcaagctccacagacaagagttcaaaatcattcacaatttgacgagacaaatctttaatcttgtgctatacttataaacattgattcaatatttgtaaatcttgagtaatcgcggtctacatcggtaggctgaggaaggtccatgcccgcacaggctgagatgcttgtagtgttcgtgcctggcccaataagccagggtaccttaacggtaacggcggaaaaagcgctaaaacttcggtcatgcgtgaatatccttaaatagtgccacagtgacggagcgtccttggaaacttggacggtggaacgaggtaaaccccgcgagcgagtaacccaaactttggtaggggcgtctcatttatggaaatgaactaaaaatgagagttcgtaagaacagatagatgattactgaaggaactttcttcctggggaagttctggaacaaaacatggcctataaaggtttacaatcaggtggcttgggcttttgcccaagctctttttatttaaaaaataatttcctaaggggatctttaaaaacatgacttaccaactatacgcaacaatggcgagtgggattgaatccattacggccaaagaattacaaaatctcggttatgaaacacgttcagataatggccgggtgtatttcgaaggcgatgtggcagatattgcaaaaaccaatctctggttacgcagtgctgatcgggtgaaaatcgcgattggtcaatttgaggccaaaaccttcgatgacctttttgaacaagtgaaagctttgccatgggacaagttcctgccattagacgccgcttttccagttgctggtcgctcagtccgttcaacgctccatagcgaaccagacgtgcaagccatcactaaaaaagcgattgttgataagttaagtactgtctatcaccgccgaacacgtttagctgaaacaggcgcaacgtatccgcttgaagtcagcatcctaaaagatgtcgtgacgatcagcttagatacaactggtcctagtttattcaagcggggctaccgccttgaaaaaggggaagccccattgaaggaaaacttcgcggcatccttaattcttttaagccgttggcaacctgatatgccatttgttgatccaacgactggttctgggaccattgcgatcgaagcagctttaattggtcacaacattgcacctggtatgcatcgtaagtttgcctttgaagacttcgattggatcgatgcttctgttttagaaaatgccaaagccgaagcgaaagcagccgaaaaagaccaaccacttgaaatttttggttatgatatcgatcaaaacatgattgatatcgctaagttgaatgcgaacgaagctggtgttttacatgatgtccagttcaaacaactcgctgttaaggatttcaagacagatttaaccaacggggtcatcatcgccaaccctccttacgggaaacgattaagcgaccaaacacaagcccgtgctttgtataaagaaatgggtgatacctatcggtcattgaagacttggagtaagtatattttaacaagtgacttacaattccaagaatcattcgggcaacgcgcaactaaacgccggaaattgtataatggtcggattcaaactgatttattccaatactggggtcgtccagtatggccacgtgcagaaaaagaataaaattttttataaagcattgccgttttcagtcggtaatgcttttttatttgctgaaaatcccttataataaagattacttcaataataaggtgagggatcaacttgacagtcattttagcagcagaaacaattcctgaacaacacgtcaaagcactaactgcaaaaggtttaacaatcatcgctttagctgatttaaaaccaagtcaactgggtagtattgagattatgtttggttggaataaagatgtaggcccgaaaattttagcagagcccggtaatcaattaaaatggattcagaccgcaagctcaggggttgattatttaccactagccacgttagctaagcaaggggtactggtatcaaacgcacgcgggatgcacgcaaaaccaatcgcacagacggcattaagttacatattacactttacccgtgggatttatcagagcttacccgcacaagcagcgcatcaatgggagcatcatgctattggtgaacaaatgacaaatttggaacaccgcacactcctcatttttggaacaggtcaaattggtgaggaaattgcaaagtatgcccacgtcatgggtatgcacacaattggcgttaatcggcacgagaaacccgttgccaattttgatcagattctaaccgacacggattacgaacaagcattgccacaagcagacttcgtgattaatgtgatgccattaacaccggtcaccaatcggttcttcgacaccaccttttttacgcaactccatcgaggggcttacttcttcaatttagggcgcggcgcttcagtcgacgaagcagctttgatgcactatctacaatccggtcatttggcaggagcagcaatcgatgttgcccaaaacgaaccattaccaagtgattcaccattatgggccacaccaaacctgattatcacgccacatatttcaggttacatcgctgatatccatgaacggctcttcaaaattttcgatcaaaatttacccagttatttagacaaaggtgaattatccgtcaatccggtagacttgtcagccggctattaaaaaacagcgtttgaagtgaaccccaaatattggacgaaactttaagcagctttctatttatattcaagacccgcgtttacaatctaagtgcaacacataattaaatagaccaaaaaggccatgatgacctattcttataagcaaccaagcacataagaaaggcacatcatgaccaacatcaagcgtaccatctctaaggcttaccaacaactatcaaattttgatcgcgttcgcattgaaactctgctcaatcagggattctcccaagcacggattgcccgcgaactcaaccgctctcgtagtactatttcgcgtgagatcactcgtggctccgttctacagcgaattcccgggcataaggtagcgttgatttactttgctgatacggcagcttatctgcacgctcagcggcgggagtggtgtcgccccaagacgatgcttgagaagaaccccgagttctacgccgcctgtgccgctgccatcaagcaacgtccacgcgtacacagtgtggacagcttcgtgcacaccttcaaacgggaacacgcagacgaggttgttccttcaacaccaacggtttaccgggatattgaggccggtagattcgaactacggacccacgacttaccgcgcaaacccagcttgcgaattaaacgaagccattcccatacccgcaccaataagacgaagcttggtacctcgattgatgaaagacccattgaagttcaagaccgtcggcaagggggccattgggaaggagatttagtgaaaggtaagcgcgttgatagcgaacctgcgttgctggttttgacagagcggatgagtcgcttcgaaatcatcatcaagctcgctaactacaaagcaagtacctgtaaggtgggacttcagtccatcattgatgattacggtgcggaatacttcaccaccatcacctttgataacggcagtgagttcgcacaactagattcagtagaaggaactgatgtctactttgctcatccgtactcaccatgggagcgcggaacaaatgagaaccagaacggccttctacgagagtttattccgaaaggtcgctcactccaccattacgacatcattgatattcagagcttccaggacgcactcaacagccggcctcgtcgtatcttgggctaccggagtgcggcggaactgatgccggaactctaagctgtgtaccacttataggattagactagaaactgttgcacttagattgacaatacgggtaaaatttttaatttatctttcgccggatttttaaactatttaaaatatacgcattttattcatccacaaatgttatagaattaaggcaatcaagtaagtgttttaatcctaataaaaatagtgggtacaataaaatgacgatttattatttaaaaccagaaaaaacagtcgatgaaattatcaatacattgcacgctagtgttgctagcatgcaatattttgaaacgctagatatgatttgcgaaaaagttgagtttaatcttgatgaagccgcgctattacaacgaattaagcaactagccgatgattaacgcgcagatttggaaacccttcattcaatcggggtttcagaaaatgatatcgaccgtttaaaagctgcaggtttattattattcgttcaggataatgagattccacaaagctatgtgacgctcagtcggaaagcattagttggtttgcaagagattgcagcggcttatgctcaagagtctacacagctaacaataaatattgattcaaaagaaattcaaagcttaaaagcagcttcagataaggttttcagaaagtatcaataagaaattgaaaaaagcccatcgacatttatgtcgatgaagtgaaccccaaatattggacgaaactttaagcagctttctgggttgtaaaaattcggtattcaaccggacttttacaacccagttttgttttaattcttgaaaaattataatcatcaatccaaaccgatatctgtgaaactaacgtttcataagtgtcggtttctttttggtagaaagcttcagctttcataatatgaaagaaactctccattgacgcattatctaaacatgttgctttgcgcgacatactttgaaaaatgcgatgttctttcaagatattagtccaatcttgatgttggtattgaaacccttggtctgaatgaattgttgtccggtattctaaatccttagggattttcttgaccgcccgattcaaaacagttgttgtaaatttaacagtcggatgtttactaatttgatggctaagaatttcacctgagaataggtcataaatacatgtgaaataggcacgttcatcaattgtcttggctccccaacgaacctcagtaacatctgtcgctagtttttgataaggacgatcagtgaagaatcgacggttgattaagttcttagcaacagtgccaacatttcctttatacgaattatacttacgagtacgtttgttaaatgcggtagatagtaattgcatttcgcgcattaagacaagcacctttttatgatttactaagatattcatacgatgcaattcaccagttacacggcgatagccataagctggatgatccttcttgattgtttggatggcatgtttaacagaccggtcagatgaaccgttcggttcatgactaataatatattcatacgtacttttagccataccaactacttttagaatttttactaatttatgtctaagccttagctcttggatgacttgtgcttgttgtcttcttcttcctggactaaggctcttaatttttttaggtattcgttctcgatttgtaataattcattttcttctctaagacgttctagatctgtttgttgccgtttttttgattgtttatccgctgacataattatttgccgtcctttggaacgatataaggcatcagcaccctcagtctcaaaaatatgttgccattgccagatagtcccaacgtttgagatattaaaataaagtgcagttttgggataagaagccttattcgttttcatccattttaaaacattcaccttaaatgagccatcaaatattttattaggtgttagaatatcaagtccttttgggccaaaggccttatacctttgaacccatgaagcaactaaggaagcacttttaatgccatatttctttgatattaagttataacccaacgatgatgaaagatactccttaacgacttttaccttcaatgttttagaatatttagtcaatataaaaacccccgatattggattttggtccaataccgggggttcacttcacgatgggcttttttgtttgccgcaaagtagcgcttggctatgcttgaacgaactttttaacgggtcctaataggtctgggttgatttgtgcacgaatcaacgtgccatcttcttcatagctttgtttagtgatattggcacgatcactgaggtacgaaacagcttgcccttctgtgtatgggactaagaagtcgagcgttgggtattgttcaaagagttgtttgttaattaaggcaatcaatgcatcgattgctacttcgtcgcgagctgaataaacgatttggtttccgtctacttcaggatagcgcgtatctggtttcaaatcagctttattgtaagcctcgatgactgggatatctttaatgttgagtgattcaagggtttcttgtgtcgtttccatcatgtccaagtagtttggatctgagtaatcaaccacgtggattaaaagatcagcactcgctgcttcagctaaggttgatttaaaggcttgaattaagtgatgaggaagttttgtgacgaaaccaaccgtatcactcaacaggaatttctgttggttggggaggacgatttcgcggacactcgtgtctaaggtggcaaagagcatatccttttcaaaaacttgtttttcaggtgtatcggggttcaaccgttgtaaaattcgattcatagtcgttgatttacctgcattggtgtacccgacgagtgcgacaactggaatcgcatttttcgtccgttgacggcgttgtacgagttgttgttgatcgattttagcaagttcggctttgagcttcgtaatccgtttttcgatgagtcggcgatccaattcaagttgggtttcacccgccccacggttcgcagtacccccgccaccttgttgatccaacttgttttcagaaggatggaggcgtggtaattggtatttcgcttcggcgatggccacttggagttgcgcttcttttgttttggcacggctagcaaagatttcaagaattaattgcgtccgatcaagaatgcttattccgagttctttttctaaattccgaatctgtgaaggtgaaagttcatcgttaatcaagataatgtccgcatcttcagcgacggcgcgttctttaatttcttgaaccttccctttaccaaaataagtggcgtgattagcttggtcgatattttggcgaacgtcaccaacgacttctaagttatcggcacgggctagttcgcccagttcgcgcattgtatagtcaaaattaacttggcgttgactaacaccagtgattaaaacctttttaggttgcatataagtttcttccatgagatctcctttttgtgagagtgcgtcttcaaatggtcagccgttgaggattagcaatatctcgtaaatgagcggcaacgccgattgtttacgagatggcgctaaacgcagacgactatttgaagaaagcacgtttaagataagagtgtggcaccggcggttatctgctgaggattagcataggcagacgaaaaaccgatttgttggttatttggctgacgtagctaaccgagagcagatgcctggtggagcacgtttcaattgaaaaaaagggccatggcaaaaatattcttttgtcacagccctcagttaattaaatttaaaaagcgaatgccaacagaaatagccgcaaaatggccacatgattattcaattgtgattgcgattaaacaaacgttagttgacatgttgttgacgctcctttgatgtgaaatgggtggttacccaccttatccgttaagtgtaccatgaaagccattaaaaaccaaagttcgcctttagcgtgtacgccaataattaacactgttgtgggtgcccagcgtaattttatggtagaatgtaagcggttatcaaaatacataagagaatcgattgggggattgacgaatgaaaaatttagcattacttgatgttggtggcactacgattaaatatggtttatgggatggtgcggcgcaacaattgaccaaacaaggggctgttgccacaccaaagtcgttgaatgcgtattatgatgtgctgacgcagattgtggcggagtttaaggctagtgaccaagttgttggggtcgcaatgagtacgccgggtgcagtgaacaaggcgacgggtattattgaaggggccagtgcgctcccttatattcatcattttgaaattcaagatgaacttgaaacgcgttttgacttaccagtcgtaatggaaaatgatgcgaattgcgcggctttagccgaagtcggtagtggggctgctaaagggctaaaaaatgtgttgttcatggtaattggcactggcgttggtggttcagtgattgtcaacggacaagtccaacatggtcgccatttattcggtggtgagtttggctacatgatgatgaatgatggtcggattttaagtgaagtcgggaccgccgttcacatggctgaccgttataatcaagaggcacatactaactactcagggcatgaagtttttgaattggctgatcaaggcgatttactcgcgcaaaaggaggcacaggtgctctatgataatctcgcacaagccatctataatttacaatatagttttgattcagaagcggttattttaggtggtggggtgtcgcaggccgatttcttggtgccaaatattgaaaaagctttacaggaaatactcaagcaagtcgatattgcgcctttcatgccaaccattcggacgtgtcagtatcataatgatgcgaacttgattggtgcaatggaagatttccgccgcacatatccgaatttagttgcaaattagactagtaaagaccgctttcaacatgtcataataaatattataaatgatattaggaggcggttaagatgcccacggaaaaacaagcattaaatcaaacgattggatttaccgcggcattagccactgtgatgggaacggtcatcggtgctggtgtgttctttaaagcggatcctgtgacgcatgcgaccggctccaccgggctgacaatgcttgcatggcttgtcggcggcttaatcacaatttgtgctggattgacagctgctgaattagcagctgcgattccagaaactggcgggatgatgcggtacatcgaccatacttatggtagtttagcggcatttttattaggttgggccgaaacaacagtctactttccagcgaacattgcggcgttgtcgattgtttttgcaacgcaatgcattaacttattcagttggtcagcttactggcagattccaattgcaatcatcgtcggactcagcttaacaatcttgaatttctttggttcccgggttgggggactattccaatccttcacaaccgtctttaaattaatcccgcttgcgattattattgtattcgggttaattcatccaggcagcaacgccgttcatgtgtcattatttgacgtgacccggtcaaatggatcggggagtttcctgtcagcgctgggcagtggtgttctagcaaccctctttgcgtatgatggctggattcacgttgggaatattgcgggtgaattgaagcatccggaacgcgatttgccgcggtcaattttaattggtttaacaggaaccatggttgtctacctcttagtgagcgccgtcttcgttcttgtgttgccaatcaatcagattgccggcaatccgaatgcggcttcagaagtggctcgagtgctatttggtggtgtgggtggtaaaatcatcactattgggattttaatttccgtctatggcgggattaacggctacacgatgactgggatgcggattccttatgcgatggcgctcgagaatcggttaccattcagtcgacaactgcgctccctttctaaaacaggcgcgccggttgtcagtggtttagttcaaattagtatcgccatcgttatgatgtttatgggtggcttcaatacattgactgatatgttggttgttgtcatctggattttctatattctaacgtttatcgctgtgttcattctgcgcaaacgtgaaccagaattaaaccgtccgtatcgcacacttggttatccagtgattccagtcatcgccattcttggtgggattttcatcgtggtgaatacattattcacacagacgatgttaactttaatcggaatcggaattacattactcggattgcctttttattactatttaaaaaataaatatccagtcgtttaacacaaaaaacgaagttcgtgaattaactgaacttcgttttttttgtggccaaaaaccaattgtagcaacggatagacgaaaaataaaatagttgcgcaaatgaattatcggcattaattgttgatttttataaaaataaactaggtcataactcatgagttgtgaccccttcgcatcaaaggttcttattggcgttttcagaaaattcgtaaatttatctacaaattaaaataatccgaaaaacatcgctcaaacattggttttaaaaggtttttaatgaacgattggcaattatcgtcgcgtgaaatatacttgcacataaccaaacaatgatataaactaaccttaactgctgcttaatcaagttgaaatgagccgctagtttgttttaaataaatgattgtcggcttttgactagccggtggtcatttattgtacataagttaaaactatattgaatgaacggtggagggttgcagatgccagataataaaagaatattaacaattagtgagtggtatctggagtgtcagaacatcacgactcaattgaataaaatgagcgaaaaacatggcttaagttatgatcaatttctcgtgttggaacagattgtggaactaggacggaacaccccaggccaaattgcagtcgtatttgggacctccgcaccagcggcttcccgtaaaatcaatacgctacaaagtaaaaagtttattcgcaaaattcgtgatatggaaaatgaccaacggaatgtttggttagaagcaactgaagaaggcctccgcaagtacaaagcgctaaaaaaagatattactaagcatactggcatcaaagcaacggacttggagcacttacggcagataaatcaagcaattatagaataaaaaagggaaagcccatcatctttagatgatgggcttttttaataccaataaggtaaatcgtaatcattttatgcataaattggtataattgtgaaagaatataaaaagttgaacttaaggggtggagaaatggcaacattaatggacgtcgctaagcgggcaaacgtttctaagatgacagtttcgcgggtgattaatcatccggaacaagtaacagatgaattgaaggaattggtgtatgccgcaatgaaggaattggattaccgtcccaatttaattgccaaagccctagtcagcaacagtacccgaatcatcaaattgtgtatcttggaagacatcgacgttaccgaaccatattacatgaatctaatggtcggaattgctaaggcacttgacctacatcagtattcgctgcagttagtaactcggcgtaactttgatatcgggaattgtgatggctacattattacgggattgcgtgaaagtgatgttgcatggattcgcgatctgacaaagccagtcgtcgtttttggggagaatcagtacggttttgattatgtggatacaaataaccagttggggacctaccttgcagcgcaattagcattagagcgtggttatcgccagcttatttatattggaatggcgagtgaagaagcgtttgaaaaatcacgtgaagccggttatttacaattaatgcatgagcagcagcgtcctgttcagttacaccattttaacaaccatagtcatttgaccgaagcctacatcattgaacactgggcgcaattcaaactcgagactgcgtttatttgtgccacggatcgtctggcaattgggattgaacgggggattgcgtcgtgtggtggtcatgtgccgcaagagtttgggattacaggatttgatggggtctttttaaatcaagttgcctctcctaagttgacaacgattaagcagtccatcattgaaatgggccgtgcatgcggagagaatatcctcaagaaaattaatcaggagtggattgagcgaccattgatattcgaaccaaacattgaaatgggcgggacaattcgccctgtgctaaaagaacaatcggaataagcataagaaaactgttaccggtaacatcaggaaaacatttgcaaaagcgctttcaaagtacgacaataaaacttgtaaacagcactgataaaaatttattggaggtcgttatagtgaaaaagatgtggaaaaagctagggttagtttcgttattggctggtgtaacgttaacattggctgcttgtgggagcaagagtgcggatggcggcaatgtgaaaatcacaattctacaaggaaaagtggaatccaacaagcaattcaaagcgattgcgaagaagtatgaaaaagcacatccaaacgtcaagattgaaatcacatcaatcggtggtgggacacagtataatcccgttttgaagacgagaatttcatccgggaatgcacctactatttttagtttagatgggccagcatcggttaaacaattcaagaactacacggctgatttaacagatacaaaagctgctaaggccgctattccaagcacactagatactgttaagtcacaagggaaagtttacggcttgccatttaacattgaaggctatggttttgtttataataaagctgtcttcgaaaaagccggtatcgatccaaagagcttaacgacttacgataaattagaagcagctgttaaaacattaaatgaacaaaaagaacaattaggcattaaaggggtctttgctttacctggtaaggaatcatggattctttcagatcatttgttgaatgtttatctaagtaaagaatttgatggcaatgcacaaaaattgtatacctcaaagaaaatgaagtttgaaaacaatgcagaaatgaaacaaatgattgatttgcaaaaagaatattccgttcaaccagtcatgcaaatggattacgcgggacaagtgaaccaaaactttgctcaaggaaaagttgcgatgattcaacaaggcgactggatttacgaaaccgttaaccaaattgatgcgaaattcgctcaagacgggatcggcatgattccaatgccagttaaggaacaacaaggtaagatgcctgttgggacctcaatctactgggcagttaataaacggaagagtaccgacgaacaaaaagcagctaaggacttcttgaactggctatatacgtctaaagaaggtaaaaaagacgttgttgagaaattacatttcgtacctgcttataaaggttacggtgatgtgaagatgccagatgcactcacacaatcggtctatgattacagtcaaaagaaagcaacattcggctgggttttcccgggttatactggcacatcatgggatccagacgttgcccaacctaacctacaaaaatatctatcaggtgaccaagattggcaaaagactgtttcaaatatgaaggacggttggacaaaacaacaaactaaataaatttattcaattggataaaacaaaaagagggtattgaaatgaaaaataagagtttatcattttggttatttttaacccctacccttgttgcattagcattagtcgttttcattccaatgctggagggcctattctattcattcactgactgggatggactctcttttactaaggtcgttgggtttaaaaactacatggccttattacaagataaagcattcggaaacgccttttggttcacggtagcttttgttatcgtgaccgtcatcttgctaaatgtaattggcttggggttagcattacttgttacacagaaatttaaaggcaacaattttttacgagcgatcttctttatgccaaacatgattggtgggttaatcttaggatttatctggcaattcattttcacgcaaggctttagcgctttgggatctgccttacacatgactgtcttccaaaactggttaacgaattcactaaccggtttttggggcttggtaattgtgacggtttggcaaatgagtggttacatcatgattatctatattgcttacttgcaaaatattccaagtgaagtgattgaagctgctgaaattgatggtgcatctgcttggcaacgatttacgcggattacattcccaatgatcgcgccagcatttaccgtctgtatgtttttaactctgtcgaatgggtttaaaatctacgatcaaaacttgtcgttgaccaacgggggaccttacaactcgacccaaatgttggcgatggatattgtgaatacagcctataattcgagtgatttcgcactcgctgaagctaaagcaatggtcttcttcttgattgtcgctgcgatttctttagtacaagtcttttataaccgtaaacgggagggcgatttctaatgaataagaaaagaaatagttggatcggcgtcctcggtgtattgattggtcttttatggttattcccattctatatgattctaacgaactcatttaaaacaccaaaaggcatttttgcctcagtattgtcgctgcctaatccattcacgaatgtgaactatggagattcgtttaaagcattgaatttcattagttcattgaccaattcgctcattattacagtctgcagtgtgttgctgattatcctctgttcttcaatggcagcctatgcactgcaacggaataaatcgaagttgagtagcagtttattgctgcttttcatctcagcgatgttgattccattccaatcagttatgattccgttgacggcaaacttcggtaatgtgcatctgttgaatatgtacggcttgatgttcatgtatttaggcttcaactgtagtttatcgattttcctatatcaaggcaccctttcaagtattccgattgcaatggatgaggcggctgaaatggaaggtgccagtcggtggcaaatttattacaagatcatcttaccaatgttgagtccaatgactgtgacggtcgctattttgaacatcattgcgatctggaacgattatcttttaccatcattggtcttaccacaagtgcaatatacgattccactacaaatgtttaatttcttcggagaatacacgaaacaatggcacctcgcattagccggcattaccttgtcgattattccggtcattgtcttctacttattcgctcaaaaatggattatcaaaggtgttacagatggcgccgttaaataattaaggaagtgttgatcgtgaaaaagcacagcgaaacaagacaaacgttattggcagccgggaattggttatggtcgctttttaccatcaaccttgcttggtttggaattaattttcctgtcattctgacactgattttaacgtttagtatgccaaacggccgagtaatgattcccggtgcagttgtgctagtgttaatgctcagtttgtttacactaccaagtttagtcgcggtttttagagcggtagaccaatggcaagttaacggtgatggtaattatgcacgcgttgtgttaaaagggtggcggcaggcactgccagactttttagtgaatctgacgttagcgacggcattgatgatcatcgtgttgttactaaaagccagtgtaggcgatattttagttcgtagcggcttattggtctggtttggggcgttattgctagttgtcgttgccagaagctacttggtcgggttagcgcgccatgatgttaccttaggcggctttatcattgccaatgggggcaaattagtgctagccaccggcgttttcatcttgttgatgggcattaatgtctttttaaaactcgcgtttatgattcttgttgcgagcgtttcgttggcagccttcattagctatcaattattgaacggtgcaccagttaaaaacgaagtaagggagaaatgatcgatggtcgaaattaatttaaatcatatcaataaaaaatattcaggaaatgataccaattctgtcacagatttcaatttgaaaattgcagacggtgaattcatcgtatttgttgggccatcaggctgtggtaaatcgacaactttacgaatgattgcaggtttagaagatatctctgatggggaatttaaaatgggcgaccgagtgatgaacaaggttgcacctaaggatcgagatatctcgatggttttccaaaactatgcgctctatccccatatgacagtcttcgataacatggcgtttggccttaatattcgtaagaatgataagcaagataccaaaaaacgggttgatgccgcagcagaaatcttaggtttatcggagtatttagatcggaagccatcttctctttctggtgggcaacggcaacgagtagctttaggacgagcaattgttcgtgatgctaagttgttcttattggatgaaccattatcgaacttggatgccaagttacgggtgcaaatgcggactgaaattgcgcaattacatcaacgcttaggtcgtaatttcatctatgtgacgcatgatcaagttgaagcgatgacgatggctgatcggattgtcatcatgaacgatggtaaaatccagcaagtcggcaagccaactgaactctataatcatccggttaataagtttgtggcaggctttatcggttcaccagcaacgaatttcttcacggtaaccttaactaatgggcatctagtgaatgacgatggtctaaatatcgcagtgccagaaggtcagttgaaacagcttattgccggtggctacgatggtcaacaagtgatcttggggattcggccggaagatattcacgctgaagaaattaccctccaaacattcccagatgctaaaataacggcagaggttgtcgtttccgagttattaggggctaacacaatgctctactcaaagattggacaaaccgattttatcgctgaagttaattcgcgggattatcatgaacctggtgatcgggttgagatggtgcttgaaatgtctaaagcacactacttcgacattgcaacggaagaaacaatctattaagcgctgctaaataggcggaatgattttggctgacgtatcggagggaacgaaatggagagaatttttgaagtcgatccgtggcagattgtcacgcatcaactagatcgtaaacataaacggctacaagagagtatgacgagtatcggtaatggttacatggggatgcgcggcgtattcgaagaggattattcaggagacagcctgcctggcatttatctcggtggcgtctggtatccggataaaaccgtcgttggctggtggaaaaatggttatcctgactattttgggaaagtgatcaatgccatcaatttcatcaaaacgaatcttaaaattgatggtcaagcggtggatttaggcaaagatgaagtgaccgcatttaagttggcactcgacatgcataatggggtgttaacccgccaattcatcgttactaaaaataataaacaagtgcaagttacgatagagcggtttgttagtatcgttcaaaaggaattatgcgcattgcgctacactgttgaaaacttggcgagcgaagcagttgagattgagattagttctatgatcgatgctgatgttcaaaatgaggatgcgaattacggtgagcaattctggcaagtgattgagcagtcagacgctgcggatgacacttatttggtcggaaaaacaatgcccaacgatttcggggtaccacggtttagtgtgggggttcaaattgatcatcaaacgacaatgatggcagatactgggcttcaagaagcccaccaagttgggcaacgttttaaacagcaattggcccctaaaacgcaattgaattttgaaaaacgagcggtagtggtgacttctcgagattattcagagttggacttggtaccaaatatgcaacgtatcaagcaggtcgttgcgcaacaaagttaccagcaattattagcggcacagacgaatcaatgggcgaaacggtggcagatggcggacgtggtgattgccggtgatgatagtgcccaacaggggattcgctttaatttatttcaacttttttcaaccttttatggtgaagatgagcgtctaaatatcggtcctaaaggattcactggcgaaaaatacggtggtgcaacttactgggacacggaaggttttgcaatgccgctttatctctcattggctgatccgaaagtgtcgttgaatctattgaagtatcggcataatcaattgtcgggtgcagaacacaatgcccggcaacaggggttaaaaggcgcgctctatccaatggtgacctttgatgggattgagaaccataatgaatgggaaattacatttgaagaaatccatcgcaatggcacaatcgcctatgcaatttataactacacacgttacaccggcgatgagacttatttgctcaatgaaggtatcgaagtgttaactgagattgcacgcttttgggcagaccgtgtccatttctcacaacgtgcgcagcggtatatgatccacggtgtgacagggcctaatgaatatgaaaacaatattaacaataactggtatacgaatttattggcgcaatggacgcttagttatacgattgaaacgctcaaaaaagtaagcgataacaaaaaagcggatctgagactttcagatgcagaactctcacaatggcaagcgattattgaaaaaatgtacctgccacaagatgaacaactcgggatctttcttcaacaagatggctttttagataaagatatccagcctgtcagtgcaatcccagcagatcaacggcccatcaaccaacattggtcatgggataagattttgcgttcgccgtacattaaacaagccgatgttctacaaggcatttggtattttatggatcgtttttcagctgctgaaaagaagcgtaattttgatttctatgaaccgttgacggttcatgaatcaagtttatcagcggcggtccatgcgattctagcggctgatctgcattacgaagataaagcggtggaaatgtacgcgcggacggcacgcctggatctcgataattacaataatgataccgatgacggattgcacattacgtcgatgacggggagttggttagcgattgtgcaaggttttgcaggcatgcgaattagcgatgaaggacaattatcattcaaaccatttctacccaaaaaatggacggcttatgaattccatattaacttccgcggccggttgttgaaaattagcgtgacggccgaccgaactgatatcaaactactcaagggcgatcgtttggcaattcaagtcaatgatgcgtcgatgatgttggaataggaggttattatggacggtgtcttattcgatttagatggggttattacggatacagcccgatttcattttgcggcgtggcgtcaattggcgcaacaagcgtttggcgtcagcttaccagatagctttgaagctgagttaaaagggattagtcgggaagcatccttgcaacgaattgtggcctttgcccaacttgatggccagtatacggtggcacaactcgcagcactggcgaatcaaaaaaatgaaaattacgtggctgctatcaagcaattaacggctgccgatattttaccgggtattcaaccgttgttagtagcattaaaagcgcgcggggtgccaatggtcattgcttctgctagcaaaaatgcgccactcattcttgatcgattagctttatcagcatattttacagcgattgttaatccgaatgacgtgcaccaaggtaaaccagccccggatatcttcatcgcagctgctcagaagattgctgttaatccgcgaaaatgcgttggattagaagattcagtagctggtgtggccgccattaatgctgcaggcgctgtttcggttgcgattggtcatgcgagcgaattatcagcagcggcggttgttgtccctacaacggcggcgttaacggctgatttgttagaacaagcctttgaacagtatcaacactaattaatcagtgcaaccgggccttcgggtgtgtgttggactggtttttttaaggaggagacaaatggatttagcagcgatttatcatcgaccagatagtgagtttgctttcttatatcagccagataggctacgggtacgattgcagacggcaagtaatgacgttgaagcagtgtacctagtgtatggggatccttatatattagtcgatggcagttggcaaccgaaaacgattcggatgcagcaaggcttaataacggatctcgcttgtttttggacgattgaactgaccattgatcgtcgccgattagcctatgcttttcaagtgattggtgtggacgggaccagcactttttatggtgatcaggggcctggtccaatcttacctaaaatagatgcttgttttcggatgccctatttccaagaaattgatcgggctaaggtaccagagtgggtcaaacaaacggtttggtatcaggtttttcctgaacgatttgcaaatggtgatccgacaaatgatccagatggaacattaccgtggacaaatgaggcaccacaggctcaagatttctatggcggtgatttacaaggggttattgaccatttagatcatttggtggcgttagggattaatggattgtatctcaatccaattttcatggcgccttcaaatcataaatatgatacgcgtgattatcggatggttgatccacattttggcaatgacgagacgctacggcagctgattactgcttgtcatcaaagagggattaaggtcatgctagatgctgtcttcaaccatctcggcgatcaatcaccacaatggcaagatgtgattcaaaatggcgcggcttcaaggtatgctgattggttccatattcgggattttccagtgcgttatcagccaggtcggaatttcgaagatgctacagacattacatatgatgtctttgccacgacgccacacatgccaaaattaaatacggctaatccagaggtgcaagcttatttgttatcgatagcgcggtattggattgaagcatttgatattgatgcttggcggttagatgtcgccaatgaagttgatcatcacttttggaaaaagttccgacaggtgtgtgatgctgctaaacctgatttctatattcttggtgaaatttggcattcagcgcagagttggctcagcggtgacgagtttagtgcagtcatgaattacgcctacactgatgcgattttggattattttattcataaaaaaattccgctccaccaaatggtttcgaagctgaatcgacagttaatgctgtaccgggatcaaattaatcaggtgcagtttaatatcctagattcgcacgatacgccgcggttgctaacgatggccaacgacaatcgacgcttgatgcgtcaaacgatggcttttatgtatctacagccgggtgtgccatgcctctattatggagatgagtatggcatgacgggagtggacgatcctgctaatcgtaaatgcatggtgtgggatcccgtggaccaagatcaagccatgtatcagttcgttaagcagctaattgggcttcgccatggtaaacaaaaactattgtcggaaggacagcttgagtggttaattgagccgactcatcccgacgtcttaaaaatgactcggcgattaggtgagcaacaattgacggctgtttttaatgcaggtcaaacagccgttagtgttgcatcaatgaggacaccaattctgtctgaaggggttcagcagcaaacagcagcgaccatcattgaaccagatggctttatgatttattaacatttcccaggcaataaaaaaagattcgcccatatggggcgaatctttttttagttaggctgctcgttttctttggaattttgcaaccagtggtaaaatcacgccgaggcccattaaggcgactgagacgacgatgtttaagattaattcgtgtgtatatttggctgtgccaggtgtggcatcttgtgggaagatactgaagatcgttcctaatgctgtaatggctaaacaccagaagccaacgatgatggcccatggtttgtttttaatgtatgtgtattctgatgggaatttttcactattgaaacggacccgtaagaaggcgacaaagatgaaacaagttacaaatggtgagacgataccgttaatatttaacaaccaattgaagatgtcgttaatctcgggaagaaaggcactagatgctaaaacaaaggcacaaatcccagtggtcaaccagtaaccgttgattggaaggccttgtttattggtcttagtcagtgcttttggtaagaattgtttggcagtgtcggataagaaaatccgtgtgccgccatcgagtagcatcgctaattgagcgcccatgtaaatcgcttgggtaacagcgaagatgtagagtaagactttacccatgtggaattgttgcccaagggctaagaaggcgtagtatgaaccgttcatcttcaagtcagctggtaagtggttggcatcgaagaagacgccgattgctaatgagccgaagatggttaggaaggcggtcattagagcgagggccatcatggcttttggaaaatcttttttaccatctttcatttggccaacgtatggtgcaacaagttcggcaccgttcatggcgaaaattaagaggccgatggttgagaagtaatgtaaatcaaattttggaatgaaggtgtgtgcgtttaatggatgggtggcaacgtgaccaccgttcaataaaccaacaaaggtcattaggacaaagaggatggtcatgacaaacatcgcccccccaccaacgatactgagtacctgtagagacgatgtaaacttgtgttggaagaagatgaagaggatggtaattgcggctgttaaaagcgcaaaggaagcccgtgagagcttgtcttcaagatttccgttcccagtaataatccaaaagaaggaaacgaccattgaattagcaacatcgaccaagtatggcaaactcgctacccagtaacaccaagcggttaagtaaccccaaacatcaccgcttgtatggcgcatccaactggaaagaccgccaccgtctttactgaaagcagagcctaagtgaccaaccattaattcataagggaggacataggcgaatagtaagacaatccatgagaagacaactgccatcccttggttttgaaagttataaataatatcgtcaaatccaatgacggtcacaaaatccattaaagcaaggacttgccaggtaatatatttcttttttggttctatttcatccatcgtaaagaaaccccttttctgaaaattcacaatgtttttattatagtcaaatcagaaagggaagacaaaacttttttgactgtttcacattgatttttaaagaacgggggaataatcttacaaaattgttattttagcccgttaaaatgtcatctaaaaagcgcgcatgccgttttaatatcttataagatagaattatcataaaatttggaggcattattaatggacacaccaacagtcgttagcgtcaaagacgttaaaaaaacatacggtaaaccaaacgaaaagcaatacacagccttaaaaggcgttacttttgatgtgaaacagggcgaatttgtcgggatcatgggggcttctggttcagggaaaaccaccttattgaacattttatcaacccttgacaaaccgactgctggccaagttgaaattaacgggcaagcaattaatgggttgaaagggaatgaattagctgattttcgtgccaaggaaattgggttcatgttccaagacttcaacttattagaaaacttaacggcctatgaaaatatggcattaccattgacgttacaaaatgttggcggtaaaaaagtccgcgatttagtcacatcaattgccaagacgttatcaatcgatagtttattaaacaaatatccaaccgaattatcaggtggtcaaaaacaacgggtcgccgctgcgcgggctttagtccataatccagctattttattcggagacgaaccaacgggtgcgcttgattcaaagagtgccaaggaattattggatacaatggctcagctgaacgaagaacaacgcgtttcaatcttattggtaacgcatgatccattttcagctagttattgtcaacgaatcttgtttattaaagatggtcaaatcggccaagaactcgttcacggcgataagagtcgggaagccttttatcaagaaattttagatacattaggcacatttaaccattaggaggaagtctaaatatgttattgaagttatcattaaccggcattaaaggccgtttgaaagactatttagtgcttttttccggtctaattatggcaagtgccattttttacatgttcgaagcactggcaactaacaaaagtttcgttacgagtaactcgccaattagcatggcgggcattattttccaaatcgggtctgttttattagggattatcacattagtctacattatttatgcgaataatttcttaatgagcatgcggcgtcgagattacgggatgtttatgatgctcggcgcaaaaggccgcaaaattgcccaactaattgctgctgaaacattagtgattgggacagctgctactctcagtggaacggcgctcggggtcggattaacccaaattgttagcaatctgttattgtctcaaatggatattcagattaagcatttttcaccattttacttacctgcagtgttagtaactttgattttcttcattatcttgttcattattgcagcggtagttaatcaattccaacttttgaaaacaccagttttacaactcttacacgatgatcaacaaccaaatcgcgtttcacaaaataaattaagccgtattgtacaaattgtcttgggcttacttttcttagctgttggttactatatgatgattaaagtcgcaacgttccaaattatgggcttagttgtggcattagtgacaattgtgctcgggacgtacttcttgtttaatgcccttttcggctggttgattacgttgctcaaacgtaacagcaagattcgtaatcgtggtttaaataattttacgttagcgcaattgagcttccgcattaaggattacaccaagatgctcgcattggtggcgatgttatttgcattggcactaggcgcaatcacagttgggattggctatcaaagtgaaattccagaaatggcagaaacaatggcgccttacgacgttgttttaaatcaaccgaaccaagaagcattgcgcctcacaaaagatttaaagggtgtgaaggcgactgctaattacgatgttaaagaagatgcgaaaactgtctactatcggacagcacaacttgaaaagtcaccaatcatggccattcagtttggtaatgggaatggtgtcgcccgcgcaaaaggggttaaaccggtgaaactcagtgagattcaaaacggcgattcttcatccttgcgcgcaattcaagtgccaagtcaatctagtaaggacgttaaagtcgtctctgacgctgaatttaatcaagtggcaggcgcaaccacgcaagttaaaacatatcgggtcaaagactttgcggttaatttacccgttatcaaaaaaattcacgcacaacaagtgattgcaaatcctgaattggctaaaggtcaaggggctacaatggatagtagcaagtatgctaactataagctagcgaacagcatgttcagtgggctcgaatttatgggcttcttcctcgggattgcattcttagcgatgttagcaagttgcttgatgttcaagattttatctggggcagctagtgatgttaaacgctacacaatgttggctaaaatcgggacgcgtcgcaatctattgcaacaatccattgccaaagaaattggggtcttattcctcttaccaggtatcgtcggcgtcatccatgtcctctttggtcttcaattgttcaaattgattatgattgatccatataatgatctctggattccattttcaattttcattattctctacgcaatctactacttgctcactacatggctctacaaaggaattgtgttgaaggaagttaaatagtagatggttgaaacagtttaaaacataggaatcagtctaaaaaagccccctttaatctgaacttcgagattaaagggggctctttttagatgaggtcgaagttgtttctctagacgctacttgttacactgatgtcattaagaggcgtataccacgctggattagtttttaacttgcttagctacaattgtggtgagcattttacctacaaaaaaagccaaagaagactgccgaaactgtcatttgaagcgcgtattattattgaacggcatgaattattgcccacaaaaaaagctgaacaatcagaataatattgcccagctctatattcaatgaatattcatacatcaattatcgttttgatactattgaagggttaattgattgtaactttcaacagtaacgccttcgtctgttaaaataactttagtaatactaccgttcattggactaacggtaacatcgaattggtcgttaccaaacttgccaacaatactgcgaatggttgtgccatgactgaccatcaagactttatcaccgtcagaacattcagcacgaagttgtttgaaacctttaccgacgcgggcccaatattcagcggcatcttcagcatcgtggaagggatcagcttctttcatgaaatctttagaggcatcgagtgagtatttggtgatgatttcttggaaggttttggcatcatgactggcacctgccatgtaccacgctttgggtgaatcttcaccttcaaaatagccgtagaattcttcgcggaagtgcggtgtgatagcatatggagtatcaaggtagaaattcttatggagaataattttagcggtgtccattgcgcgactgcggtcactagaataagcttgagcaaaattaactttcgctaattctttgccagcgcgttcggcatctgcaatccctttcggagtaagtggtgagtctgaccaaccttgcatccggttataacggttaaagaatgtttgaccgtgacgcactaaataaagtgtgattcgtttcatatcgtaaccctccaacaatagcttttagtaccttcattctagcatagataaaaatggtgtgcagggtcattccatattttttgcaaaacggttatatacatttataatttttaatggtaataataacaattgatttataagcaattgcaattatcattaagagagaataaattttaaaagatactaataaataactttatcaatatttattaatattttaagcataaatcttttaattttatacattttgtgttatttttgactagtaacacttaataaccacgtttagtgtttatgtaaaggagtggttcgatgcaaccagaaacggatagtaaccttgttgatcgattcaacgaatggtatctgcaaattggccaaatttacaataagataaatcatttaactgtcacgcacgacttgacatacgatcaatttttgattctcagagaggtcaaattaaaccccaatattgaagtggcgaaattatcggaatcctttgatctttcaggcccagcaatttcacgtaaaattaatgttttattcagaaaacacttaattgttaaaaatcgcagtgatgaaatggaccaacgtaaagtattcatttcattgaatgagcaaggattacgaatggttgatcaattggaagtcgatttctacttattctttaaacattttaaagatgacggcaatgcagacctttctcaattattcgcacaaacaaaccacttattcgatacactggataaatgggaacctaattcagatattattgattaggtcaaaaaagccgcgcacaaatttaaatttgtgcgcggctttttttatttaatcgttaaagttgccattttctacgtctttgatgaaagtcttcaagtgatcgaagtaaacgggtgcgttatcaatcatgtgatggtgaccaccatttggcgttgtcactaagcgagcatggggaatcttttcagccatgatcttagcggttgcgattggcatggtttcgtgttcaccaaatgtgattaacgttgggacagtaatcttgtggagttggtcacggaaatgccaatcctttaatttcccagtcacaacgaattcattatcaccttggaagacgccataaacgtcggttgccattgttgggattaaatgtgagattgcaagtggttgtttgcgatcaacgtaaccagcgtttaacttgtcaacaagtgcttggtattcatcgttgtcgtaatcattcttagcttcacagtcttgcatgaatttcaattgttcaggggtcatgatgtcttcacgaattttgttgatgtttgtgacatattcgtcaatttcatcgaccatactcgagatgatggcaccttttaagtgttggccatatttagcagcgtacatttggaccaatgcgccaccccatgattggccgattaagtagaagttgtcgatgcccagtttttgacggacttcttcaacttcatctaagaagtaatcatatgttaataattggtcattgcctggttgtgagtaatcaggttgatcagaataaaatgaaccaagttggtcgtacatgtgtacttgtacaccaagatcagctaattccttaccgaagttttcccagtattcgtgattaccaccagggccaccgtgtaagcagagtaaatgaatgtcgcctgttccttgcgtattagtccataaatggtaaccattatccaatgtgaggattgttgttccttgtttcatatctgcaccatcctttaattatgatagtttcattataaacctattagagagaatgtgcgagggtcaacatgatttagttgagcgtttctaattggcgtcgaatggcaggaacagcctgtttattccccgttagaatgaggtgatcattgagatggatttgcgtgtcaccatgcggcatgatcagttgcttatcgcggtaaattcgactaattgtgacttggtccacaaatgggagattagaaagttgaatcccggtgaagcgccgatttttaaccatgacttcgaagagcccggcatcggtgttatcaatgatttgtaaggtagatggagtctcgattaaacttcgcaacagactgatatttgcttcgtaagtgttaaaaatttcaacgccatgttctttaagttcatcgtattgatcgtccgagatattcttaaattcaaagcgggcgatgatccgcggtactttggcctgaatcgcttgttgggcaagttgataattttgctcattatttaaatagcctaagaccaggatatctgtatcgaagacggccgcgtcagttaaggtggctggtgccaagtcaggcaagagttcgaggttggcttggctatggtagatttgataattttgttcgttattggtaaataattcgcttgtgtacagacctttggataactgttgggcgattggaattgtcatgatgtttgcgccgatgaagttaacacgtttgcgcggcatctcttcaggtgttggtaagtagaatcgattgaacagaatcggaccaagaatacagctaatcaccgctgcaattgtgaaagcgccggattgctgtgtcgtgataaccttcaagttgagaccgaccgtcaaaatgggtaagaccaacgtgatggttgtcgaactgaggaaagtcccggcgagggcgttggtgactttgaagcgccgttttaagacgaagtaaatcaaaactttggcgcccatgaaactgatgaagaaaaagggaatcagggtcagtgatttaggatcacgtaagagcgcggggatgttgagttttgcaccggtcataatgaagaagatgggaatgaaaaagccgtagccgattgatgttaatttatcttgcgtctcttcacgggggcgtaaaagtttcatgaccatgccggctaagaaagcgcccaaaatactttcggcaccgacttcttcggcaatcgatacaagtgtgatgattaagaaaaaggctaaacgaatatcgagttgagtcgttgacttatcaatccgctcaaagaagtgataaacagttttaaaacgcatcaataagaagatcgcggctaagaaaattagtgatagtaaccacagactcttagaaccaggattattgagggcggcataaattgttaacgaaatcagcgggacgatttccccgaggacggcaattaacagaattgtttggccaagcggctggctgaggagttctttttctttcaacgcggcgatgacgacccctaacgcgatggttgaaaagagaattgttgcgagtccaatatcggtgaacaacccactccatgccaataaactggcgagtcctagcgaacttaataggatcagcgtaaaactaccgactgccagttgtaagggcgtcagcggtgttttaacgccagatttagctgtggtgggttgctttttaaagagttcaaagtcgatttccatcccgcttaagaaaattaagacggtcacacccaatgatgaaagttccgtcagtgtgggggtggttgagatgaggtggaagccactttgtccgagtaaaatcccgaccaaaatttccgcaacggcggttggtaaataagaaatcttaaattttgccatgagtaacggcgtcattaaagccgccaatagaacgattacgagcgctaagcttgtcataaaaaagatcctttcaatgctcaataaagttgtgtagagcatacactaacctactaaagcatgtcaaagccgaatagcttccgagcaacagcacgggttcgtaaataggcggtgtagccgactgtttgcgggccacagctgtgcacaggaagttggctttgatagctagatgggtactaaagcatgtcaaagccgaatagcttccgagcaacagcacgggttcgtaaaattggctttttatatattggcgctaatattatcgattttgttgataattcgttagtgattaaattattattaaaaagttggcattatcgctagttaatatctacaactaatttacaattggtaataacttctgtaaaatagatgctacgatattaaaaagggggcgatctaaaatgaagataaaagaaagtctcgcggttggaatttttgccttttttggcgggattttacgctatgcaattgggctcggattgcaccaagcagcagggtttccgtatggcactttgtgtgtgaatttaatcggggcgttttgtcttccttttttaatgcgttacatcgtggttcgttatcagattagcgatacgctggcacttgcaatgggcacgggctttttcggcgccttcacgactttttctagttttagcgtggatgcattgaagttattggtggccaatcaatggtggccatttagcctgtatatcgggattagtttgattggcggtgtctgcttaagtttagtggcagattactgggcagtttggctgctcgatcggcaaggaaagtcgcaggtgctaaaatgatgacgttattaattgtcggattgggcgcggcaatcggcgctattttgcggtatcaattaacccgtcttggaacgcagattgccagcgaatatccattaatcacctttttaattaatttaacggggagcttttgcttaggttgggtgaccggggcacaattggatcaaacgtggacgccctttttgggcgtcggggtcttgggtggctacacgactttctcaacgttcaatagcgaattgagtcagctgtggtttcgccgccgttaccatattttctttggttatctgctattaacctacgggttagggctggtggttgcagcggccggcttttttgtaggaagatcgtgaaacgtgctctagcaaataactttttccgcttagctacatcaggaaaacaatcgactacatcgcttatttccctgattaggctaatgctcgaaagttaaaccgtttcaaacgcactctaaacgtgctccgataggcatatttctacgcttaaccaaatttaccgaaccgacgattgcatcgccaattcggtaaatccagttaatgctcaaaatataagcgcctatcgtcgcactcttgtgaatttagtgttaaacttgtagaactgtttatttagaaatcgggggacatctgctttgactgacgaacaaaaatcattagaacaacgccgtttaaccgagattgtcggtttaattaaaaacgccgaaaagcacttcgaaggcgccgttgaacgggctaaatcagaagaaaaagaaattaacgcaaacttctttaatgatgtacggttgaatttcaataatgattcagcaatgactgaaacggcagtctcaatcgaacaacaacggcaaatgttgcaagaacggaataattcttggcaacaatcttcccggcaacttgagactttacaaaaaatggaaaaaaccccttatttcgcgcggattgattttaaagaaaagggtgaaccaaagtctgagtccatttatattgggctagggtcattcaccgatcgcgaagatcatttcttgatttatgactggcgggcacctatttcatcaatttactatgaagggaagactggtgaagttacgtaccaaacgcctgacggcccgcaagacgtcaatatttctttgaaacgtcaattcttaattgaagatggccaaattaaggcgttatttgatacgcaagaaacaattggtgaccaaatgttactggaagtattgggcgaaaagtctgatacacaaatgaagagtatcgtgacgaccattcaacgggaacaaaatcaaatcatccggaacactgacgcggacttattgttcgtgcaaggggccgctggttctgggaaaacatccgcgattttacaacggattgccttcctactttaccggtatcggggtaacctggattccagtcaagtgatcatgttctcgccgaaccaattgttcaacgattatatcgctgacgtgttgcctgaacttggcgaacaaaacatgattcaaatgacttactatcaatatgttgcacggcgtttgccgaaccttgctgttcagagtttatttgaccaattcgaaacaccaatcacggaaactgatgcgcggattagccgtttgaaagaaagcctagtcttctataaagcagttaaacgttacgcagcgcaccttgaaaagggcgatatgcgtttccgtgatttgaaagtgaacgggaaggtcttgattagtaagaaaaaaatcagcgacgtctactaccgtttcaacgaaaactatcatttagggaaccggctagatgcgacgaaggaaagtttattgcgcagtttgagccataaagtcgaccatgaaacgaaggctgactgggtgacagaacgcgctgaaaacttaagtgatgaggaactccgcgaaattatggcgggtaaggactttaagactggtgaagcggaaagtaaatatatcgctaagcaaatcgttttgaaggctttcaaacccgttcaaaaaggaattcaacgcaatcgcttcttgagtattcaagcacaatacgtccacttcatgcgggttgtgccgcaattggttgatttggctgaatttgatctgacaccagaaatctggaatgatcatgtgactgattttgtcgctaatttaaaggccaaacaaatgacgttatcagatgtgacaccttacttgcatctttatgatttaatgaccggtaagcacggcgaacgcgacatgcgctttgtctttatcgatgaaatccaagattacacaccatacgaattggccttcttgaagatgcacttccctaaggcgcgcttcacgttactcggtgatttgaaccaagcgattttcaccaaagaaaacagcacgaacctattacaacaagtgcaacaactctttgatgcgcaaaatacgaaggtcgttcaattgacgcgttcatatcggtcaactgaacaagtcaccgactttaccaaagggctcttaaagggcggtcaaaaaattgaagctttcaaccgtgaaggcgacaagccaaacttgattgtgcgccaaagcgaagatcaattggtcgctgatgtgaatgcgcaactcgctaaaaatgaagcagataagttaacgacggcgattatcaccaagacattggtgcaagcccaagaattaacagctaagttgaaagccagtggtacaaaagtaactttaattcgttccgaaaatcaacgtttggcagcgggcacgttagtcgttccaagtttcttagccaaagggttggaatttgatgcgattatcggctggcaagtcagcgcaactaactacaatcatgaagatcaacggcaattgctctacacgatctgttcaagagcgatgcatcgcctcactttattagcaacaggtggcatgtcaccattgattgataatgtggatgcggatgattacacgttaattaaatagaaaaaacgcgcgctgaaaggcgggcgttttttgattggatgaaaagtgtaatcgcgagaaaatggacaatgaatattttaataaagcgcttttaattattaaaatgtttatttataaatttaatgggttttaaagcgggctaataattatttagcccgcttttttgcatcttatcgctttcttagcttatggattacttattaattgccaaacaaaatattgtacattgaccgattctattcgttaaagtttatatataaataatgtccattattacattatttatattatacttacttataattcgatcgtcccccttagactgatgctggaatggcaattatcgatactaaagtatttttatgaggagtatatgatgcaaagattaaagtatttttacaggcgacatgccttaacagtaaccctattattttttggactattaagtattgcgatggttgcaatcgtctatttacagcccaataaaatcctgtctggttctgactatcatttccacatgaaccgcattgagaatttggcactttcgattaaacagggagagtggtttccgagaatcagttactttttcatcggcggaatgggctatgcggcaggtcttttttacccagatgcttttctctacttaccagctattctgagagtagtaggactatcaatcaaagagagttttattgtatttgcaattgcgattaattttagtacgtttttaatcacatatatttcaggaaaattagcggattttaataagaagcaagcattaatattctctttgatgtacggtcttagtacttatcgttttgcagatttagttaatcggcaagccattggtgaggtgatcgcgctcacctttttcccattaatgattgtgatgctaacgcggttaaaaaaaggtgagcaccggtattggtatctgttatcaatagggatggcagctattggttatagtcatatgatttctgttgaaatgatgggcattgtcatcattatttataccttattaaatctcaagagattctaccaaaataaaagtttaaagtatctcattgctgctggcttattagcaatcggtttattagggcgttatttcttagcggttggagaacaaatggcaaccacgatttttcaagtaaccgcacaacccctggcatttttatctgaccgcacattaccctttaaagacattgttgttaattcattaacgaatgctgtttttcatgcgaatacagtgaatgtcggtatcacgattctactcggattaggcatcgcgtgtggtctattttactattccaaaaacgaccgtgatttaattgggattgcgttggggctattcatagctacgacgtcgattatgccgtggcatttgttggatcatacaattatcaatacgattcagttcccgtggcgtttttttgccattattacggcaattgtgagttacttagttgctaaggatgaatgtcatttattaaagaataagtactacttttatctgctaattctgttgttgggcgcaggaaatgtcatctactctacgaatagtattcaaagccaaagttggcgctttagaacgaatgctgcctataacacgcccaacccttattacattggggccggacatgagtatttacctgctcaaaccgactaccagaaaattttgcgacataaaaaacaggtcgttaagtatcagccgcataaaataaaaattacaaatgtacggcatacatggggccgttatcagtttgatttcaggacactgacggatcaaaaagcagttgttgaagtcccctttatttattacaaagggtacgttgccgaactcaaccatcatcagcgattaccaatgcagatgaataaacgaactgggttaacacaagttgcgttgaagggaactggtagaatcaccgtttattatcgaacaactacgattcagagaatagggacggtgattagtttgcttaactttgggatgctgatcataatcattcataaagaaaaaaggcgagctactaaatagcgcttattcatggtactggactaatcctcgaaatataatcgcaagatgacgcactctgttttgaaacgtgctttcatcttgcatattcctgtggttagttacgcaccgcaaacaatcgccttaaggcgcttattcacggtactagactaattcctcggaatataatcgcaagatgacgcactctgtttttaatgttaaaatggatgcgtttagtattggaggattgtcggatgaagaacgagatgaaatattatgaaatctcgcgtgatgagtggcgggtttttcatggccgcggtgacgcgtatactggcatcacggacacggagctggaacagattcggggattgaatgatcggatttcacttgcggatgtgagtgatatttatttgccattacggcatctgatacagatgcactatgaacagtaccagatacgccaggccgaaaaatctgaatttctagagattaagccacataggacaccatttgtcattggcatcgctgggagcgtcgcggttggcaagagtacgacggcgcgcttgttgcaactccttctcagccgggcctacccggataagaaggttcaaatgattacgactgatgggttcttatatccgacagccacgatgaaacaaaaagggattcttgataaaaaaggctttcccgaaagttatgatatgccgcatctaattcaatttatgaatgcggtcaaaaataatgttggaccagtcaaagcaccgaaatattcacatcagatttacgacattgtgcccgacgagttcgacgtgattgacgatccagatattttaattgttgaaggaattaacgtactacagttgccatcaactgagcagatttacgtcagtgacttcttcgacttttcaatttatgtcgatgcgcaagccgacttaatcaagaagtggttccttgaacgtttcgatctattactcgatttagccaaagatgatccgaccaactactattatccatacgccatcagtgaccgacagagtgcattcaagatggcgcggcgggtatggcgtgacattaatttacaaaatttaaacgaatatatcttaccaacgcgtaatcgtgccgatgtcattttgcataaaacaaaacatcacgtgattgataaggtattcctacgtaaatattaataatagaatgagttttttcacaggaaggccgtcaatccattgacgttttcattattaatcagtaaaatagatacattatagtttgacttagtgctatgaatctagcaatttggtgttacttgttcacaccaaattgctttttaaaaagaggagtgagttgtttggcccaaaaggacatgcaagatttcgataagattatcgtattagattacggtagtcagtataatcaattgattacacgtcgtatccgtgaattcgggattttctctgaattgttgcctaacacgacaacagcagcagaaatcaagaagatcgcccctaagggaattattttctctggtggcccaatgagtgtttacgatgatggtgccttttcagttgaccccgaaatttttgaactagggattccaattctcgggatttgttacgggatgcagttgatcagttttaaaaacggcgggaatgttgaagcatcaacagaacgtgaatatggtaaggctgaaattacagtcactgacaaagacagtgacttattcaaaggtcttcctgaaaaacaaacggtgtggatgagtcatggcgacaaagtcacagcgattccagaaggtttcgtaacggttgctgaaagtgataatacacctttcaccgccatcgaaaaccgtgaacgtcggatttatgggattcaattccataccgaagtgcggaatactgaattcgggaacgatattttgaagaactttgcatttgacgtctgtggggcccaagacaactggacaatgaacgatttcatcgacatgcaaatcgaaaagattcgcgaacaagtcggtgacaagaaagtccttcttggtctttcaggtggcgttgattcatctgttgttggggtgttattacaccgcgcaattggcgaccaattggtcagcatctttgttgatcacggcttactcagaaaaggcgaagttgaacaagtgatggaaagtcttggcggtaaatttgggttgaacatcatccaagtggacgctaaagaccgtttcatgagtaaactcgctggcgtttctgatccagaaaagaaacggaagattattggtaacgaatttatccaagtgttcgacgaagaagcaactaagttaaacggaattgatttcttagcgcaagggactttatacactgacattatcgaaagtggtacaagtactgcgacaaccatcaaatcacatcataacgttggtggtttaccagaagacatgcaatttagcttaattgaacctttaaatacattatttaaagatgaagtccgtgaccttggtgaaaaactaggcatgccatatgaactcgtatggcgccaaccattcccaggccctggccttgggattcgggtccttggtgaagtcactgaagacaaattaaagattgtccgtgatagtgatttaattctccgtgaagaatttgcactcgctggcttagataaaactgtatggcaatactttacagttttaccaggcattcgtagtgtgggtgtcatgggtgatggccggacatacgattacacagttgggattcgtgccgttaactcaatcgacggcatgacagctgacttctcacggattccatgggatatcttgcaaaaggtttctgtgcgaatcgttaacgaagtcgatcacgtcaaccgcatcgtgtacgatattacgagcaagccaccttcaacagtggagtgggaataaaatcctaatcaaaacaccgcaagtcgtttcgacgacttacggtgtttttttttgtgcaatcaatttaggcttttaacggtacttctttgaaatcagacgcaatataaggtaccgtctaatcaatgaaagtagggatgattgatgacaaatgggcaacaattagcgactagtgaaaaaattaaacaagggattgtctttgcggtggcgaagttaattcaaattctccctttaattggcttaaccatgattcatagcgggcagtcagtggcgtcttatatgccgtatatcttattctataccgcgttgaaaactggcttattattcgtgaatagtctaggccacgtgcagaattcgtttaaaataactagtatcagtatgctgctagctgctggtgccttattgttattggccatttcgccgtggttgtatctaaccgatatggcggcttttatcttgggggccagcgccagtgtgatcatgccaacctatgagggcgtttattatcacgagcgagtggtttggaaatggcaccttatgggcactgaaattaaaacgttattggcttttagcctaataacggttggtctgttgaccatcgctagtcatttttcatatcggttcatctttattgttatcatgctatttgtattgattggtttcattggcatgcaacgcttcgaaccgtttgtgaagcaacttgatgaatcggtgttcgtcgaacaaaccaaatcgcttaataacttggaactatttgtctgggcaaccgcgatggcgtttgcgctaagatatctgcgcctttttgaagctaaatttgtctggttattaatcacagtcgctgtcattgggttagtcgcgctaatcttgcgggtgatcatcacgcgcggcactaaaacgaagatgccgggttggcttttggttgcggctttaattaacggggcgtttgaaacattcttaatgctctatatttttgtcgcaattcaaaatcagagtttgatgataggcgcctacgtgacttacggtgcagggatgattttagcccaagttattagaaagagcgtgcaagggcgcttttcgaagttatcagacttaaaagtccaattactaggatttgttgctggtgcgtggttgatgattacgccacatctaattttattaggcatcttattgattagtttctttggcagtgccaacagcattcttttaaatcatcgcgcttattacaccggcgtcacgacgccggcccaaaccttaattattaaatatcggaatacgtatctcggtagtatcctaatgcaatttatcttgatcaccggcttgatgggcctagccgtaatgcggcaacaagacataacggccgtgattgcccaaatcagtggcagcgtcgcaatgtctgacacaaccagtcagttgattcacttggccggcctgattagcgttggcttgctaacggtaattgccggattggctggcagatacttgccggcggtggatgaaaatccgctgatttaaaagtaaaaaaataacggtccctaaatggggccgttatttttgtggtttttgaggattatgttattatttatatggatcttttttggggatgaaaagtgtaaaatgagtagagaggtgccttctagtggttcaatagttaattaaacgaatatgaatgatctaaaagtatgtccggattctaaaggactgcttaaaaatcaacattcttggttatgaggattgagagatatgttaaagagtaagtaactataaaattcattgtaattatgaactatttaaaagatactacacaatgtagttttggtaaaataaaaaatatagattaggaaattgtaggctttaacatagagtgaggtcattttttaagtggtagattgtaaaattaatccgaacgctgttcggacaaaaaagatcagcttcctttaaaatggtgtttaccacaaacccatcttttaggagctgatcttttgtctagtataacctattccgaacgaattaaaatcgaaaccttttgtgaactagggctgtccaatatccaaatgggcgttcggattaattttacaatctaccataagcctaccgattttttaatattattttattcatcaatttccggcgccgacccaagctctgcctgaatcatccagattttcttctcaattgcggttttgagaccaatgaaaatatcttgggtactgaagtctttttcaacatcggatacttcaatgccgtgttggtaaaggtcttccaagtaacgatagccatcaactaagtgtgcgaggcgttctggggttgttttatcccattcaccaggccagtcttgaatcttagtgttttcggccatttcttttaaggtcgagtaaggactgccatcaagcgcaatcagccgttcagaaatgacatcgagttggctgtcaatttcttccatgaactcatccatcaaggggtgcaacttcaaaaagttgggtccacgcatgtaccaatgcgtctgatggataatcattgacatctggctcaaatcggcaacgagttgatttaatactgctttggttttcgtatatttcattagattgatctcctttcgatatggttattataacatagtggtagcttaatctgaaacgttatacactggcaaattaagttatttatagcccgtagaattaagtcgttttgaaaagatggagacgttacaatctaccaattaaataaatctacaattgaattttatttaccttatgaagatgttcaaaacgcgttaaaggaaagtgcgcaaaacccctttatacgtacaaaggatgaatgggtagtgggtaacaatgagtgtaaattaaataaggcacaaaaaaggatgcttaaggataaagaaatatataatcatttcaatttagaaaatattcccagttccatcaaaacggagctaaacaagatagtgcatgacatcgatgactaatactttaacaccaaacagaaaggggctatgaatatatagggtctataactatcaaatagtccatttttttagtataagagcagtaaaaccagacgtggaaaccacgtggtcttttagttgattcagtaaaagaagccgaagccaaagtgaagacgttggtttcggcttctttggcttttaattgcgggaacgcacacaaagagccaaaaaagattactgacagccatcttctgatggctgccagtaatcttttttaagttcttgttcaaaaggtttgataaaatcaaagctagaaactagctccggtcatgcttgttgcgatcattatcgcgtaagtcttctacgtgggcatcaccactcgtatcgatatctagttcttcgcggccgacgttttcacttacttgtttcatatcttcgtgttcttgtttacgaatgtcaacttcttctcgaacgaccgggcgtttgttgacatcgatctgttcttctttgattgggatcgtgatcgtgtcgtcttctagcgtatcattgacatcggtagttgcagccgcaccatctccgggctttctttcgatcacgatttcttctcgtttaaccggtacgtcgactgttttcgtctcattgacaacatttttatggatatcgactttacccgtcgtcacatcatgcttattgatatccaattgttcttctttaagctggatactatcagtatcagtatctagatcagttgcacgtgcagcatctgatgcatgtaaattatttgtgctagtgtcaccagctgcatgtctgcctgtaacattttcagttgcttgtgttgggtcgtttttataattattgacggtgataataatttttccagctgagatatcatctctatattggtaaagcgggtcgttgtttgcatggtcagcttcttcatttaaacttgaatcgtattcgtacgtatcagcagaaaatgcatctttgattttttcccatagtgagcgatcttcgtgagtcgtttcgacgccatttacgccggttttaacatcgattcctgacagtccagcaaaaccaaaatttgtagctgcatctttgttggtgtaaataatgatatcatcacggctatagccttctctttgcagttgttcgatcacggataaagcttcttctctcgtactgtaacttccaataactgttaaatttctttccaacatataaatccctcccatttcaactatttttttaaatacgcttataattgcagtataacgaattcagcaaaaactttaagatatagattggctcaagtttgagcagatgacaccagttttttttggactttctccgaaattggagaaaagcgtttgtatcaaatgttttgagtagcatggaattttccgttgtatctttaggggctctaaaatctctaaatgaggttgcacaatttttcgcagactatttgaatcaaccattttgagtagggccgaattttcggccgagttaatactagatgcccccatttttggggagatgggaggtcttaacctgggggaccgaaatggtagtttagaacctgtgccctgaatcagggcggtggtgtatgtgatggattttctatacccgacaacttggcggatatgaaacaagctactataacgtatcgtcctgttaggctaaaaagggatgtccaaaattggacagacctatttaataaatacagttgtaatttatgacataaaaaactggtagttgctatggcctatgtttaatctaggtcgttgaatgatttaatttaatgacttagcatgagcactagcccaaattaaaagacggccaataatatgaccgtctgttgtaagttatgtatatgccccgtgcgtttatttttgttgaatacgtgaatacggttttgaatacggtttgtcgtattcactatgaataacaatctatttagagaaaataaaaaggctgatatatcaatgcctaagcacgtctataccaacctatcttttataaatgatgcgtcacccgggagtcgaacccggatctcaagaaccggaatcttgggtgctatccattacactagcgacgcattccgcgtactcaacagtacaatatattatattagcggagttaagcggaaatttcaagtgtaaattttgataaatcgcgataaatcaacgtttaaaaaatattcggaaagaaaacgtattcatcaaccccaaagcattgcatctgttttctgcacttgttataatggtcttgttcaaaaggataagttactagttttagtaagttgccttttattttttgccaaccatgggtcgactaatgacacagatggacattttatgtcccacggaaagtaggcgatagcaattgcgcgatgaattatctgcaatagaagcggttgcgccagatttcgtcggtatcattaagaaacgttaccaggtgttacaacatatcgattggctcgcgccagttggccgacgaacgcttgcggaacaactgaagatgagcgagcgagtaattagaactgagacggattttctgaaagcacaaggtttgcttaattcgtctaaatcaggtatggttttaaccgtgaaggggaatgaaatcctcgatcagttaagacaagtaatggatcaattcttagggttacatcagactgaacgtcagttgagtcaagtcttaggcattgaacattgcttgattgtttctggcaatagtgatgaacaaccaaaagtcctcaccgaaatgggcaaattagtcaatagtacgttacaattattattaccacaagggcaaagtattgtggcagtgatgggcggaacgacgatggctgaagcagctcatgaactttcaactgatctatcgaaacagcgcaatctaatctttgtgccagctcgagggggaattggtgaaagtgttgatattcaggccaatgcagtctgtgccgaaatggctaagcagacaggtggtaagcatcgggcattgtatgtgcctgaacaggtgagtgagaagacgtacgcgcctttgttagaagaaccaagtgttcaagaagtgttaaaactgattgaacgaagccggggtgttttacacagtattggtgaagccattgcgatggctgaacgtcgtgagatgccgattgaaaccatcaagatgcttaaagaaaagcatgcggtgggtgaagcctttggttacttcttcaatgcacaaggcgaagtcgtgtacaagattccgcgaatcggattacagattcgtgacttattgaatattccgtgtgtactggcggttgcaagtggtgcttctaaagcccaagcaatccaagcgtacatgcaccttgcacctaaacagacgtggttaatcacggatgaaggtgccgcaaactcgattttacaaggggcaaccctttaaaataaaaaatttttcatttcctaaaggaggaaattctattatgactacaaaagtagggattaatggtttcggacgtattggtcgtttagctttacgtcgtatttacgcaacaaacagtgatgtattggaagttgttgctatcaatgatttaacatcaccagacatgttggcacacttattaaagtatgatacagctcatggtcaattcaaccacgaagtatcagctacagaaaacagcatcgttatcgatggcaagaacattccagtttatgctgaatcagatgcacgtaatattccttgggttaagaatgatggtgttgacttagttcttgaaagtactggtttctacacatcagaagaaaaatcacaagctcatatcgatgctggtgctaaaaaagttcttatctcagctcctgctggtgctgttaagacagttgtttacggtgttaatgatgacacaatcacagctgacgataacatcatctcagcagcttcatgtactacaaactgtttagcacctttagctaaagcagttaacgatgctttcggtatcaaagctggtacaatgacaacaatccatgcttacacagctacacaaaaattacaagatggtcctgatcgtggtggtaacgtacgtgctgcacgtgctgctgctgctaacatcatccctcattcaactggtgctgctaaagctcttggcttagttgttcctgacttgaagggtaaacttgacggccacgcacaacgtgtcccagttatcactggttcattgacagaattagttgcaactcttgacaaagaagttacagctgacgaaatcaacgctgctgttaagaaagttacagaaggcaaccaatcatttggttacaacgatgatcaaatcgtttcatcagatatcattggtacagaattcggttcagtattcgatcctactcaaacacaaatcgttggcggtggcgcaggccaagttgtcaaagttgttgcttggtatgacaacgaatcaggctttactgctcaaatgatccgtacattagaaaaatttgctagcttaatctaatttcacttttgtgaacttaggaatgcgatagcattttataaggcgggaggaggtaaactccttccgcctttttttatgaaaatctaggaggtttgtccacatggcaaaacaaacagttgcagatttaaaagatattaaaggcaaaaaagtcttagtacgtgttgactttaatgtaccaatcaaaggcggcgttatcggtgacgataaccggatcgtagctgctttaccaacaatccaatacatcatcgacaatggtggcaaggcaatcttactttctcacttgggccgtatcaagagtgacgaagataagaaagaattgacattgaaaccagttgctgcacgtcttggcgaattattaaacaaagacgttgctttcgttgcttcaaacgaaggcaaagcattagaagatgcaatcaatgcgatgactgatggtcaagtattggttatggaaaacactcgtttccaagacatcgacaacgactttggcaaacgcgaaagtaaaaacgatcctaagttgggcgaatattgggcatcattaggcgacatgttcgtaaacgacgctttcggtacagctcaccgtgctcacgcatcaaacgttgggattgcaacagctatgaaagctaataacaaacctgcagttgctggttacttattagaaaaagaaatcaaattcttgggcgaagcagttgacgctccagaacgtccatttgttgctatcttaggtggcgcaaaggtttctgacaaaatcggtgttatcgaacatttattagctaaagctgacaaagtcattgtcggtggtggtatgacttatactttctacgctgctaaaggtttatcaattggtaactcattagttgaagaagataagatcgaattggctaaagaattaatcgaaaaagctggcgacaaattagtattgcctgtagataacgttgttgcagacgcattctcaaacgatgctaagacagaaattgttgaaggtaacattcctgatggctacatggcattagatatcggacctaaagcaattgctgacttcgaaaacgtccttaaagatgctaagactgttgtttggaacggccctatgggtgtgtttgaaatggacaactttgctaaagggacattggcaatcggcgaattcttaggtaacttatcaggcgctacaacaatcgtcggtggtggcgattcaacagccgcagttaagaaattaggcgttggcgacaagttaacccatatttctactggtggtggcgcatcacttgaatacctagaaggtaagacattacctggtatcgctgctatttcagacaaataatttaaaattaagaggagattttctcatgcgtaaaccaatcattgctggtaactggaaaatgaacatgaacccaactcaaacaactgagttcgtgaatgctatcaaagccaacttacctaagtttgatcaaacagaatcagttatcggtgcacctgctgttgacttacctgctttattagaagcagctaaaggcacagacttaaaagttgctgctgaaaactgttacttcgaagatgctggtgcattcactggcgaaacttcaccaaaaacattgaatgaaatgggtgttgattatgtcatcatcggtcattcagaacgtcgtgattacttccacgaaactgatgaagatatcaataaaaaagcacacgcaatcttcaaaaacaacatgacacctatcttctgttgtggcgaatcacttgaaacacgtgaagctggcaaagctgaagaatgggtttcaaaccaagtaacagaaggtcttaaaggcctttcagctgaccaagttagctcaatggtcattgcttacgaaccaatctgggcaatcggtactggtaaaactgcttctgctgaccaagcacaagaaatctgtgctgttgttcgtcaaacagttgctaagttatacgaccaaacagttgctgacaaagttcgtatccaatacggtggttcagttaaacctgcaaatgttaaagaaatcatgggcaaagaagacatcgacggtggtttagttggtggcgcaagtatggaacctgcttcattcttagacttagttcactttaacgactaatttttaacgcattcctgtttacgaatggcgtaaaattagctaaaatagatgtaggctttgcctgacatccaaaaaagcgctaatgcttaacattagccaaaaaaggagaaaattacatgtcaattattactgatattttaggtcgcgaagttttagactcacgtggcaatcctactgtcgaagttgaagtttacacagaagatggcggctttggtcgcgcaatcgttccttcaggtgcttcaactggtgaacatgaagctgttgaattacgtgacggcgacaaatcacgttttggtggcaaaggtgttttaaaagctgttgaaaatgttaatggtcctcttgcaaaagaaatcattggtttcgacgctacagatcaacgcggtatcgatgctgctatgattcaattagatggtacagaaaacaaaggtaaattaggcgctaacgcaatcttaggtatttcattagctgctgcacgtgctgctgctgacgaattaggcttaccattgtacgaatatcttggcggccctaacgctcacgtattaccaacaccaatgatgaacgttatcaacggtggtgctcactcagataacaaagttgatttccaagaattcatgattatgcctgttggtgctaaatctgtacgcgaagctatccgtatgggttcagaaactttccaagcattgaagagtcttttatcagctgacggtaaagttacttctgttggtgatgaaggtggtttcgcacctgacttcgcaaacaacgaagaacctttacaatacttgatcaaagctattgaaaaagctggttacaaaccaggcgaagatatttcaatcgctatcgacgttgcttcatcagaattatggaacaacgaagacaagacatacaaattacgttggtcaactggggaagaattcacaacacctgaattcgttaaataccttgaaggcttagttgctaaatacccaatcatttcaatcgaagatcctatcgatgaaaacaactgggaagactgggcatcaatcactaaagaacttggcgaaaaagttcaacttgttggtgatgacttcttcgtaacaaacactgattacctacgtaagggtatcaagatgggcgctgctaactcaattcttgttaaagttaaccaaatcggtacattaacagaatcattagaagcaatcgaaatggctaaagaagctggctacacagctgttgtttcacatcgttcaggtgaaactgaagatacaacaatcgctgacttagttgttgctacaaacgctggccaaatcaagacaggttcaatgagccgtactgatcgtttagctaagtacaaccaattaatgcgtattgaagaacaattaggcgatacagcttcatacaaaggtatcaactcattctacaatatcaaaaaataattgaatatgttcgtgtcggcacattttgaggtttaacagcccgcgttaaaggattatgtttgtagtcttttgacttagggggttaccattgaatatggcgagcaaaacatatctagtaagagcatcttttaattaagatgctctttttttgtgcgataaattgaccggataaggtaatggattggattaggctagcaactaaataaacaatccccagcataaccggttgattaagaaaagcttatggagcattgcgcaataattaccagaataatcttgcaaataattacgtttgcaagcggatacataaacattagactatagatagcgtagagggattgaaacgaggagttgcgataagcatgaacaaacgagaacacgctattattcaatatagtttggcccagcataaaacgtactatgtcgacattgccgcacagttacagctttcagagcgcaccattgcaaccaccttgaatgatatcgaaagagccctttaatgtgaaactcgttcgaaaaccgaatgacggtatttattttaccggggatgtcgcgacattagccaatcatcttgaaaaaaaggccaatgatcgtccccaatccaaggaagaacgctgtcattgcattctggctaaattattattaggttcagcatcgattacgattcaacaactttctaataccctatacgtgagtcggagtacagtcgagaatgatttgaaaaaggtaaagcaaaaactcgcgcaattcggtcttcaattggcaatcacgcataccggtttatccttaatcggttctgagcatcaaaagcggcaagcaacggtggagttaatcagtcagtattggggaaaacggactgaggctaaagagttaaatggacagttagtgcgccatgttcaattaccggataatctgaatcaactgtttgaaccagccttgattaaaaacatactcacagctttaacggaattaattgaaaaaagtacgctatcatttactgattacgagtttcagtcgttagcgattcatctgatgatgccagcaccaactggtggaagcaatggagcccaaccagtggtgacaccgttcattgccgaaacacagctgttagtacagattttagaacggcgatttgaattgacaattccggattttgaacaggaatatctcaaccgtcatttagtaacggtccaatcgaaggatacatctgttcaaactatccagaccgagttgcggcaatcagtcgggctgccacaactattacggcaacagcttgctcaattagcagttgatgaggaattaattcaggggttagcagttcatttaagttcggcacttcgccggcttgcaatgggattgagtattaataacccatatactgatgaaatttgccagaattttacgcaagcctttgatcaagcagtgttactaaagccggtgcttgaaaatcagtatcagattcaaatgaatgaggacgaattagcctttattagtttacactttgaagctttttttgaacgacattcagaagatgcacgcttgagtgttgtggtggtttgtagtagtggcattgggacatcgcaattattagggcaacggttggccaaaacgtttgctcaagaattacggattactcgtattattgccttgggagaactacttgcaaccccgattaaggaatcgctagtcatcagtacgattgcgattaaaggtttgtcagtgccggtgattgaagtcagtcctttgttaaatcggcatgatattggaatcattcgccagatgattactgaacaaccgacgcctaccaatcacttagtagctttattgcaacccgaactgacaattgtcacgcaagagcagttaacggatcaaggcgcaattgaattaattggtcagcggctcattgatcaagggtatgcaaagccaacggttgtccaggcagcgctggcccgagaagctttagcaagtacggcacttggtcgagtagctttgccgcatgcggattcacaattaattaccaagccagccattgggttgctgattgcaccccaaagtattaattggcaacacaacgacaaagtgcagctcgtcttctttatggccttgaacgaaactgttcatggccaaatgcgggcgatttatcatgatttagaccaattgattgaaaccccccgtcttttaaagcaagtcgcacaagcatctgatgggacggctgccctcgccatcttggcacaattgaatcagaaaaattagaatggagtgttaccagatgaaagaatttgatgttgaaaatatttttacagatatcgttgttggggatgataaaccgacggcattagcaacactagcgcaattatttgctgataagaatgggttagatcgggttgcattaaccgcgggattcaatgcgcgtgaagctgagagcacaactggttttgggaatggggtggcgattccacacgcgaaagtggcgggattaactcaaccagttgtcggaattgtcacgtttgaaactggtgttgattgggaagcattagatgacgcaccagttgaaatcgcgattgccctaattatgccgctcgatgaccctaataagacgcatttaaaagtgttgtcgaagtttgcgcgcaagttgatggatgacgcttttattcataatttgaagcaaaatcggcatgatgcaatggcactctacacgttagttaacgatgaaatcgaatttaactaggaggatttagaagatgaaaaagtttgttgggattacaaaatgtccagttgggattgcccatacttatatggcagctgaaaaactgcaaaaagccgggcaagctcgcggatatgaagttaagattgaaacacaaggcgcttcaggggtagaggatgaattaagcgccgcagatgtggctgatgccgatttcgtgattattgccgctgacgttgccgttgatggggaagaacggtttaatggcaagccagtactatatgcgaagaccgctgaagctattaaagattctgatacactgattgaaaaagcactaacggcaggcatttatggcaagaatcagccgaaaatagaagctaaacaagaggacggtcatgaacaaagtccaattattaagcaattattaaatggggtttcccatatgattccgtttgtcgttgtcggtgggttgtttattgccttgtcaatcgcgattggtgggcatccgactaaagcaggaatggtgattccaccacataccatttggagtagtatgaatcagattgggacgattggttttaccttaatgattccaattctcgctggttatatcgcttatgctatttcggggcgtgcagctttagcacccgcaatgatcggtgcaatggtcgccaacaatacagacatccttggtacaaaagccgggactggatttattggtgcgattatcgttggttttgcggctggttacttggttaaatggtttaattcatggcccgtaccaaaagatttacggccagtgatgccaatttttgtcattccgttattaggggttgggattatctcagccgttttaattctcgttttaggcgcacctattttatggttgatgacggcactacaagatatgttaacggccctttcacaaaatccagaaacgggtgtgattcttggcgttgtgattggtgcgatggtcgcgattgatatgggtggcccagttaataaagtggccttcttattcggggtggcatcgattacggctggacatccataaatcatgggtgctgttgcttgtgccgttgctgttccaccattggcattggggattgcaacatttgttcgtcgcgatctttatacagaagaagaaaaatcagctgggattccagctatcttaatgggcttgattgggattactgaaggcgccattccatttgcaacagctaacccaaaacaagttttcccaagtatcattgctggttcagcagttgctagtgcagtcgggatggtcttcaaaatcaccgatgcagtgccacatggtggcccaatcgttggggtgttaggtgcaaccaataatattggtttgttcttcctctcaattttggcaggggttgctgttgcggtcgcaattttaaccacatttaaagtacgaaaagcacggaaagcttaatcttaaaagggcacacgagtaatcggcgctctttttttgtgggtaaaaaagttatgaacatgcgcttttttgaattatataaagcgctgtctatcgaattttgataaaaactggtataatagagccaattaaggtaaaaaggggtggcagtcgtgaaaaaaggagatcgccaagcacgaatcgaacaaatcattaatcagcaagttatttcgacgcaagaggatttattagcaacgttgaaacaagatgggattgatgcaacgcaagcgaccatttcacgtgatattcgggagatgcaaatcgttaaggcacgggatgtgaacggtgagctccgctatacgatttttcacgatgacgaacgcacccaaactcagaaattaaaagataaactgcgtgaagtggccttgtccattacacaagtgcaaatgttaaacgtaattaagacgctcccaagtaacgggaatttattagcagccttaatcgatgatttggggtacccagaagttgtcgggacgctggcgggtcacgatacgattgttatcattagccctagtgaggaactagcagccgaattaaacgaacgtttcgcacaacatctagcaacagcgagataagcaaacaaataaggcgttgcgacaaaagtaattttttgtcgcaacgccttatttgttgagctaaacatgttctgtgttaatcctcaggagatatccggctgataactcactctttaatctacatactggttaaaaatgtctgggatgggggctgttactgttctttgttcatccgtgaagggctctgtgtagcgcaacgtttgcccgtggagtagtaggcgctgtgttgaatcggttggaaagtacaacggatcacccaaaatgggatgaccatcagccgccaggtgcaagcgaatttgatgtgttcgccctgtttcgaggttgactgccaaggttgctgcaggtccttttcgatgcagtaattggtaatgggtcactgcggataaacctgtgatgtaatcaatcgtgcgtttgcgcttattgtatggatcgacaccaattgggaggttaatcgttgcatgttccaagagtgtttgttccggatcgttagcaatagcgatgtattggcgcgacattgttttttgactaagctgtcggtttaaaatgccgatgacgattggggttttaccaatcaagagcacgccactggttgcttgatcgatgcggtggaccatgtaggcctttttatcttgtttagcaagataggccgccacttggttcattagggtgaagttttcaccaggaccgttcggatgggttttaatccccgccggtttattgacgaccagtaaatcatcatcttcgtataaaacggaaaaagattgccgttcatcaagttcgtagtcttggaccttaacggaaacttctgagaagttcatcgtaatttgatcgccagcttcaacgtgtcggttgaaggcgagataatgtccgttgaccaaaatatcttgattaatccgcaagaaatgttgcattttttgcggcactaaccagtgattcagcaggccgcggacagacatcggactaaagtcgggcgctaaagtcacttttttttggtaaattatcattagagttcaaccacctttaagctattagtttagcgaaaattggtgtaaaagtaaattttaaaagattgttaatgtcttcgattggcatcagtgtcaattgacgaatatgctacaattaaacaagattaattttgaccgtaagaagagggatcgcatgaacaagcaagattcgccgttttggttggcgattaaacaatttatgaaacgcgtctggcgcgtgattcgttatgtctggtatcgactacaattgacgagatggctgattctcgctgttttaattctcattttcgcgatgagcagctggctcacgtttaaagcgaagacggctaacgtcggtgagattaaggccaacttacaaaccccaacggcgctttatgacattaaggatgaacgcgcggggacgttatattcgcaaaaagggacttatgtcgatcttgataagatatcgccgcagattcaaaatgctgttttgtcgactgaagatcggaccttttataccaatcatggattcagtattaaagggctagcacgagcagcagttgggttagtgattcatcatgggcagattaccggtggtgggagtacgattacccaacaactcgccaagaatgccaagttgagtcagaagcagacgttctcgcggaagtttgaggaattattcttagctgttcagattaccaaggtctattccaaacaggatatcttagcgatgtatttgaataatgcctacttcggtaacggggtgtggggcgttcaggatgcgtcaaaacggtattttggtaagaatgcgagtgaattagatgctagtgaaggcgccgtgattgcagcgatgttgcggagccctagtttctataatccggctgaccatttagataatgcgactgcgcggcggaacttaattctcggcttgatggtcgataataacaagttgacgcaagcacaagccgacgctgctaagaaagagcaacttgtcgtgacgaatacctacgagcagtcggatgggtatcgttatccgtattactttgatgaggttgtgaatgaagccattaaccgctttgggttgaaagaagaagacctcgttaagaacggatacaagatctatactgccctcgaccaatcccaacaaagtaagatggaaaccacctttaaacaaaattggttgttccctgataacgctgcggatgacaccttagttcaaggtagttcagttgcaattgatccgaaaaccggcggggtatcagccgtcgttggtggtcgtggtgagtatacaatccgtggttatagccgcattacacagatgaagcgtcaaccgggatcaaccatcaagccattggcggtttatacgccagccttagaagatggctaccactatgattcatcacttgaagataagaagcaaagctatgggactaaccactatataccaacgaacccggataacgtttataccggatcgatgccaatgtatcaggcgctagccaacagtacaaatgcgccggcggtttggttattaaatcaaatcggcctcaaacgcggcattaagtcggtcgaaaaattcggcatttcagtacccaagagtgaccaaaacttggcgatggctctaggtggttggcaaggtggggtttcaccttaccaaatggccagtgcttatacggcttttgcgaataacggtgaattgtctgaaacacattttattcggaagattgttgatgcgagtggcgccgtgattgttgataataccgaaccatccaagacacggattatgagccaaaaaacagccaaagaaatgactagcatgatgttgggcgtttataataatgggactgggcgttatgcgaaacccaacggctatcaagtcgcagggaagtctggtagtactgaagtgcctgatagttatggctttgggaccaaagatcaatggttagtcggttatacgccggatattgttgttgcgacttggatggggtatgacaagacggatcaagatcactttatgaagaacactagcattgacggtttagcaccaatctttaaatatgagatgcaacaactcttaccaaccacagcacagacggactttgatactgaagatgctcaatcgttggcgaaaaaagaacagagtgggacatcgaacgaattagtcgattcaattgaatcgggttttaaagatgggataaataaagcgaaagatacagccaatcaatggtataataatttgaaaggttttttcaattaaatacatggaaaaaggagtcagtacaatgacagttaatatttatgatgatgccaaccaaatggcaacgcacttgcaagaattaccacaatttttaggcttacaaaatgcctttgcagcattgaaaaaagacgatattgccttcacaatgtttaagaaattccaaacgcaacaaatgacacttcaacaaaaacaaatgcaaggtcaagaattaacggacgacgaaattaaagaaatccaagaacttgctcaaaaaattggggacatcgacgcaatcaagaacttgatggaacaagaacgtcaattaagccaaacaatggatgaattaaaccaaatcatctcaaaaccaatcgcagatatctaccaagcatagaatgcgtttgaaacgggtttggctttgaggattaacctaaaaatgagactgatggcgtattttgtcatcagtcttattttgtagttaactggaaaagtcagtttcaaaaagcacgtttcaaataagagtgtgactgattgcggtcagcaactgagcattaatacaaaaatcgcgttaatccaggttctaggattaacgcgatttttaaattaagcggaagttgttgcaaccagaagcacgtttcaaacggtgaatcgattgatttcgattcaccgcttttttattgcctaaaaacagaacgtttgttctaatcgcctttatcacaccgcgtggcaatggtataatgaagcttatctaagctggttacgaccggccaaaagaatggggtttttcaagatgaaatttatccatgcagctgacgcccatatcgacagtccgtttgtcggattaaaacaagcaccgacagcattgtgggaaacaatccatgcgtcaactttcacggcgtttaaaaaattaattcagacagccatcgatgaagccgtcgattttgtattattagttggtgattcatttgatcaagaagcgcagagtttgccagttcagaaatttttaaaacaacaatttgaacgtttggcagatgtcgacattccggtctatctgagttacgggaatcatgattactgggatgccaatcaagtgcattttgaattgcccgccaatgtccatgtttttggagcacaagtagagtcgtttgaactgactaccaaaggacatgagagtgtgaccattgtaggattcagttatgatcaacggtggttgtcagctgatcgagtggttgattttccacaacgtgccagcacaacttacacgattgggacgttgcacggtagtcaaaaagcaacggccgatacagatcactacgcaccatttacgattagtgaattgaacgcttgccattacgattattgggcattaggtcacattcataagcgccagattctccaagaacgaccagcgattgtttacccggggaacttacaagggcggcataagaatgaacctggtgaaaaaggcttttatttagtggataccaacgatggtcagttcgatttaacgttcaaaccaacgacggtcattgagtggcaacgtcaacagtttgaggtgacacctgacatgagcttaacgcaattgcaaacggctttgagtgcccaattgatgcaaagtgatcacgctagtttagtggcgctagagctaacacacgcggagcgattatcgagtgacttattgcaacggattaataatggtgaattattggcggtgttacaagaccaattggaaaatagtgaaccactgcattggccatacgcgttgaagttgcggtttgcagcacaacagcaatttagtcagattgaccaagcctactgggaacaagcggctgcagctatcttgacaccggacaatattctggaaaaagcaaagccgttaatgaaggaaaactttatccgggaagcaattgaaacaccagaatttcaagcggatctcaaggacttagtcacgacaattctacaagagaagaagatgggggattagccatgcgaattaagacagtcaccattttgggcttcggtaagtggcatgatcagacgattgatttgaataccgactatcaagtcctttatggtcaaaacgaggcgggtaagacaacccttacagcctttattaaaggcgtgttattcggctttgcgaccgctaaacaacggtatgaacaatatgtgcccaaaaacggcgcacaatacggtggtgaattactggttagctatcatgatcgcgatattgtgattcggcggctttccggtaagtttgggggcgacgtaacggtcatcgatcaaggccaagaatttggcgctgattacttagctgacctcttggcaccagcggatgaagctttgtttacgcagatttttgaaacgaaccaacaggatttaaatcagatatttaatctaaaacaggctgattttttgcagcatttattgacgattggtgcggtggggagtcatgagtggctcgactttgccaaggaactggataaggacagtcagaaaattttcaaaccctctgggcgtaagtggccattgaatgttgctttgaagaattatccagagttagtgcaatccgttaacgaagctagtcgtggttatcaagaatatgaaacgaacgcacgtctattgcagagtaccgttgcgacaatgacggaacaccaaaagcaagtggctgaattaaaacaacgccaagcgcagttgcaacatttgcttgatcgttggccaagttatgcggaatggcgagcacttcaaactaaacttgaaaaggcaacgccgtttgacttaacgattgacgagcaataccaagcattagtggtcgaacgagaacgcaatgcaaaggcgttagcagaagcaaaatccgaggtagcaactgttcaagaaacattggatcaaacaggtgaatttcgattttatcaagctaatcaagagacgttggtgccattgtttgaacaattaaatgaacagcaaaaacaaattcaattacttggattacggcaaaaccaaagcgcacaactcgctagcgaaaaagcccaattagcagcgcagtatcaatggcaaacggatcaactaccaaatccgttgacagacgagcaacgcgcacaactagaacaagccgaagctgaaatgaatgaggcaaccacgaccagtcaagtgctgaccaagcaactggctgatttagaggcgcaattagccacgcaaaacgcggcagttagtcaggttgaaccacaagaaacgccaacgactaatggacgtgccagtcaattgagtatgctgattggcgtagtcatattcatgattggtcttttcttgccgggcgctctgaaagtcattgcggtcgctggactggccgcacttggctatggtggttacatgatgtggcaaaataaacaatctgaccatgaccaaccagtgcaaaaacaagcttggcaacaagcgctcgccaagttggatgtgttgcaggctgaaaagcaaaccaagacagctgccttacaagcacaacaagcaatattgcggacgatgcacgaacaaagcgcggcattgttggcgcaaactggctacgaaacagcgatgccaatcagtcaagttttagcgatgcagcatgctttaagccggatgactcaattgaccacggcactcaaacaacaacaagccgataatcaagcaatcgaagcggcactaaatacgtattgggatgcgtttgcttttgcccgtgattgggtgggggtgttacagggcagtcatgaagagaacttgtcccaggtgagccaattcaaagcccggattacccaactcacacaagaccttgcacaaagcaacgagagttaccggtattatcaacaacaagtgacacgcttaacagatacgattaaagaacaagacgctgcacaaacagcattgctagcaaaggctaacttaacaaccgccgcagaattagccagttgtgttgccaatgagcaacagcgccgtgctaatgaacaacgtcaagctgatttaaaacgcgaattggcaacggacttgtcggctttacaagcaatcgctagtcaagaacagcttaagcaacaagccgctcaaattacagaacaagtggcaagtttgacaagtcagttacaagaacagcaacaagctgttgcgcaactacgcgtgacgcaagcgcaacttgtcgataatgacagttatcaacaacagcgacagcgacaattacaagaacaggctaagattactgatttagcccaagagtggctcgctaagcagttagcaattgattggattcaagcgacgctgaaggccgcttcacaagaacggttcccccgtttattggaaaaggcaacgcagtattttgcaattctaacccagaatcggtatattaagattaacttcgatgacacactgatgacggttttacgggcggatcaagtgctttttgaagtcggtgaattatcacaggggactgcagagcagttatacattgcgctacgctttgcgtttgcagaagaggtagctgacgtagtctcattacctttattggtggatgatggctttgtcaactttgatgatcaacgccaaatcgccgtttggacattactccaacgactcagtgtggccaaccaagtgatttatttaacggccaatccgcggacgcaagcgcactttgaagcggatcattggttaaatctagaggaagtggggctgacacatgacagcaaagaaattatttgattaccaaaacgacgagaatctggatttatttgtactaattaaaacggcggacgtgcggattgctaaaaacggcaagcaattcatcgcgtttactttccaagatcaatcgggacaaatcggtggtaaatactgggatgcttctgatgaagacgttgctaaatttacggcgggtcaggtgatccatttacaaggtaagcgggaattataccaaaataatccgcaagttaagatttataaactgcgcttaacgacgggggacgaaccgcaaacagttgaccagtttattcctaaagcaccggtgcaagtaaccgagatgcaagacgaatttggcgcgatgttattcgaaattacaaacccaaattggcaacgtttggttcgacatttaatgcaaaaacatcaagcggaattcttcagttttccagcggctaagaccaaccaccacgcgtttagtggcggcttggcctatcatacactttcaatgttgcgcttagctaagacgattgctgcccaatatccacaaattgatgaggcattgctatatgctggtgttatcttgcatgatttaggtaagacgctagaattgtccggtcctatttcaacggaatacacggttcgtggcaatttgatcggtcatattgtactggttgatgaagagatagtgcgggcttgtgatacattaaagatcgacgtgaatgctgaggatatgttgctattgcggcatgttatcttggcccatcatggtttaatggaatatggttcacctgtccggccacaagttcttgaagcagaagttctgcatcaaattgatgaattagatgcaagtatcacgatgatgacccagtcattacaacatgcggaagcaggtcagtttactgaacggctcttcgcaatggatgggcggcgtttctatcgcccagtcgaagatcctaatttagatcaaccaacagaataaatgtacaaaaagaaccccgctgcgacagcagcggggttctttttgttaatgcttatttagatgatgattttgaagctttgctgttaacgccgtagcttgaaaggatgtctgataaatctttgtccttgatagatacgttagcgttcttaagtaccttagtgatgactttgttcatcactgtttggtctttaagccatgaagcgtaaacgatgtctgttaattctttcttgtgatcagccatcttacctttaccagggttcttgatcatccggataacgtggtaaccataagttgtcttaacaggggttgttgtatattcgtttgtctttaatttgaaagcagcagtcttgaatgttgagtcaagtgatgtatcagtactatcgaagacaggtaatttaccgccatctttctttgtaccagtatcagttgaatatttcttagctaattcgttgaagttctttgttgagttgtcttttgcaagtgcatcaatgacttcttgagctgtttctttcttttcaactaagatatgttgaacttggacttttggttcgtatgatttccattgtttcttcaagtcagcattggttacttttttgttatcttttagtgctgcttgtgttaagtattgtgttttgatgctgttcttaaatgatgtaggtgtcatactgctttgtgcaagcacagagttgaatgatgaaccgtattgttttttgtaaccatcataagttttcttaacttttttatcgatggcttttgagccgtattggttttcaagcgctttttgcaagatcatttgttgcaattgttgcttgccggcagatgtttccttgatttctttatagtattcgtcttgagtgattttaccaccctttaggcttgcgatagtcttgctaccacaacctgctagtgaaactaccattaataaactagcagcggctaatagccatttcttcattgtatgacacatccttatcaaaatatttatgaataaattcgtagtgaattcaccaattaatataacacataaactaactaaattgaacgaagcgtctaaaacttcacagaactttcaaatttaggttttacgctaaaaacgcgggaatcgttgatatacttaaccttatcgcttgcatacaatctaatttttggtgaatttatttttttaagttttgtgtcaaacgatcaactgattcttcgatttgagcaattcgtggtgctgcttcaaatgaaaatgtttgcaatgcatcactgataccaccaagtgatgtgactgcagttgttttgagttcatttgataaattttgcgaagctgtttgcaattgaacagcactttgttgaacatcagttgaactttctgagagctcgtttaaatagcgggcaatcgcttgttgtcgtttggggccggttgtagaagcagtgagaagggcataagccgtccctaataagccaccaactagtaatccttttgaaaatgacatgattagtcctccaattgtgcgtgaataccatctgcgatcgcttgtagttggtcagcagtgtaatcagcgctattatcaccgaattgcattgcaaatgaatcatccgctgtgtaacgtggaataagatgaatatgagaatgaaaaacggattgataagccaccgcaccgttattattgcagatgttcattccttggatggctggattgctagctttaatagccttagcaatctttggaatgcgactgaaaacggccgcagctaaatcagcatcgtattcaaagatgtccgccacgtgttttttgggtaccaacaaggtatggccgggtgtcacttgtgtgatgtccaagaaggctttgacatcgtcgtcttcatagaccactgtgttcggaatttcatttcgaacgattttgcaaaagatacaatcatccattaattatgcctactttctcttatttgaagtctcaatacagcttaatgctatcataaacaagggcttttcgctactgccatcagctttgtaagcggatggaaaaatattgagtgggggcatacactcgcagtttacttcgtgttaagatatgatatgaaaaaggattcactaaaaaagtagttttaaaaaccaaaaaacgaggctattgattatgagtttagagattaaccaattaacggggggctacgcgcacgtccccgttttaaaagaggtcagctttactgtgccaaacaatcaagtggttggtttaatcggtttaaatggggccggcaaatcaacaactattaaacacatcattggattattgacaccacaaaaaggcacaattactttagacggtgtgacgttacagtcgaatcccgaccaataccgccaaaaagtagcctatgtgccagaaacgcctgtcttataccctgaattgactttaaaggagcatttagaattaacaatgatggcttatgatttaaacgttgaagagacgtgggttaaagccaatgcattgttaaaacgattccgattagacaataagttagactggtttccggttcacttttcaaaagggatgcggcaaaaagtgatgatcgtcaatgcatttatgacgaatgctgacttgtttatcatcgatgaaccttttactggactggatccattggcaattcatgatttattagaaatcattgctgaaaaaaaagcacaaggagctgcaattctaatgtcgacccatattctcgcaacggcgcaacaatatgctgattcatttgtgcttttaaatcagggtcgcgtacgaacgactggcacgcttgaagaattaaaggttgaatttaacatggctgacgccgatctcgacgatatttatctgcagatgacgaaagaaggttaaccatgcaagcattatggcaaaaacgcgtgcaaaaacatattcaagaacaagtgaagtatttgcgcctcgttttcaatgatcatttcgtgattgcgattatctttttattaggagcgttgggctacacatatgctaacgccgtcaaaggactggatccacgagcttggtggctaaaacctgtattgagtttagtattacttgcggcagttagttttggccgcttagcaacattattaaaagaagcggatagtgtcttcttattgccaaaagaaagtggccttgtgacgtatttgaaatcagcacgtttatatagtagctggttaccattaattgcaatggcttttgtgacgcttctagtggcgccactcttgttaattactaagacggtcccggcatggcacatagccgttgccttgattacattggtaatcatcaaagaccgccgcttttcaatccagttgcgtcagtggtaccaagcggatgaaacccaggcaacaaaagggctttcgttaatccttgatttggcaataattgccagtcaattatatcagtggctaaatttagtcggagtgcttgtagcgcttggactagcctattatcagcgacaacaattggcgcgtgttcaaaagacacagctattcgattggttagcggcagttggtgcagaagattcacgaatgggacgaatttaccgcctctataacctcttcacggatgtgccagggctcagtagtcaggttaagcgtcgtcgctatttagatggcttattaaagccaattacagctaaaccagccaatacttacctctatttatatgcgcgtggctttttgcggggcacagaattcagcgggttatatatccggttagttgttttagggggcatcattctgtgcttcagtcacatatggtggttgagtttggcactcggacttctattgatttatctagttggttttcaattattaccgttttacaatcagtatgatcaaattattttcactcatctatacccagtaccaacgaccaaacgaattcaagcgttcagccaattaatgcggactttattattgcttcaggcgttactctttagtgtcattttattagtgacactagggatgacgattcaagttggtttaagtgttttagcattgttcgtgctcgtgattggctttgttcaattctatttgcctaaacggttgggggcatagtccctgtgacacgcatgctttcctacttgacgactactggctaattattatatgatacccttagttattagacagttgaagcaacgtgagcgctgtattttggcgctttattttattgaagaggagtcgaggctgatgaattttgacctggatactggctggcaagttcgtccggccggtggtgatacgggcgctgcatttttaggcgttcgcgcgtcagaaaagattttcctaaagcgcaacacatcaccatttttagcggcgctctcggcagaaggcataacaccacgcttaatctggacgaagcggatttcgagtggggatgtcttaaccgcacaagagtggctcaacggccgaaccttgaaacgtgatgagatgaatagcccacaagtcgctaagttattagcacgggtgcatcaatcccaactattgaaacgaatgttacaaaaagttggcggtcgtgtctggtcagcaaacgaaatgttgcaagcctatttttacgacttaccgcaagatttacggcaacacccatttttagaacaaacagctgattatttgaagcaaacgttacgtcaattacaagcaccttctgcagaggtgtgccatggcgatttaagccataagaattggttgttatcggatattaatcgactctacttagtggattgggactcggcaatgttagccgaccctgcagtcgatttcggaatgattttatttcaatatgttccacgtcaagaatggcacgagtggcttgagaactacggcctagaggtgacgcctgaattaatgatgcgcgtcaactggtacggcagtttgaacctactccaaagcattaagcaccattatcaacgtggtcgttttactgaaatgaaccgtgacatattgcgcttagaagcagtgatttctgaaataattaataaaaattaaatgccaaaggttgggcaagtgtccaacctttttgattggcatcaacaaggagaacataatgcgtttaagaaataaaccttgggcggcggacttaattgcggccaaccccagcatgattttagtgagtccggaagatatcgccggcaagtggcaaacacgttttgccaaagaacaacccatttacatcgaagtgggttcaggtaagggccaatttatcactcagatggcacaaaaatatccagaccggaactttatcgcagttgaaatccaagaatcagcgattgccgtcattttacaaaaacaagttgaattgaaattgccaaatctccaattattattgggtaacggcgcagccttaacaactttctttgctgaaaacgaagtggcaggggtgtacttaaacttctctgatccatggcctaagacgcgccatgaaaagcgccgattgacatataagtcattcttagcggaataccaacaaattatgcaaccaacgggctacttacgtttcaagactgataaccaaggtctattcgaatactcattgatgagcctgaatgattatgggatggtttttgacgacatctcactcgatttacacaatagtgaacttgcagaagacaacatccaaacggaatacgaagaaaaattcagcaagcgcggccaagtgatttacagattagaggcacactacaagtagagtgctttcaaagctggtcagcacccgagcaatagcctagtctggtgaataaccaatgcaattggttgtttgccggacgtagctatgcacagggtgctagctttgaaagcacgttttagataagagtgcacttgacgctcggtcagattttgagcattaacataggctggcgaatgagtgatataatcgctaatttgacaggtgtagttaggcgcagaaatctagcgtcaatagcacgtttcagcaagagtgtttttatcacacgggttgcctttgaggattagcctaagaaagggattgatgggggttctttaccatcgattcctttctgtagctaaccggaaaagacagtgtgataaagcacgtttcaactcaaaaaggtacgttatccagattttatctaggatagcgtacctttttaattataatattggttgaaacgtgctccgcgcggtatgttcctgcggttagcaacgtcagtcaagcgaccaataaattggtcactcgtctgactaagctaatcctcagaacgtgcccaccgcgctgcgcactttaaatttgtgagaattcaatcacgacgccggttcttgcgtctaccttgaatcgaaattggtttgtaccatcttcacgctcgcagatgatgccaccttgatagactggaaaggtccgtttgttttgtgagaataagtggggactttcttcaatccaagaacccacaatctggccttcatgttttaagccggctttaacatcttctaaaatttggtttaatttgatcattctttgttgcgcccgatattgcttcgcactggcagccgccgccagcgcaaaaccgatgccggttaataaatatttaaacgtttgcccattttttttcaaagaaaaactcctcagtcgtttttgtctttaaatagtatagcataatttttggtcctaaggagtggacatttacggacaaaccgcttatattaaaacgagtagtaaaattgaaggggtgcataatgaaagaattagcagcgatgacagatacgaatctgactcatctgattactgaagggaaacatgttttattttttacagcaacttggtgtagtgattgtcggtttattaaaccagccatgccagaaattgaagctgaattcccggaatacgactttattgaaatcgatcgggaccaatttatcgatatttgtgaagaatgggaaatctttgggattcctagctttgttgtgattgataacggtaaagaaatcggccgttttgtcaataaagatcggaaaacaaaacgcgaaattactggatttattcattcattgaactaaccttgaaggagtcattaaatgttaattgcaagtatgaaccaagcggcttttcccaacatcttagtggtaatgacccaacctgatgttgaaaagcaagtgacaactgaaaaacaatcaatcgtacggattagtgatcaggcagatcaaaccatcggctataatttcttagcggtgaatgagttattgcccgatttacaattcaacggtgttcaaacactaactgaacagcaagttgctgttttaaatgaagcacttgtagcagctggtttcaccggtgatttagtggctgatgaaacaccacacattgtcgttggttatgtccaagaatgtgatgtgcatcctgattcagaccatatgcacgttactcaaacacagattgcacctgatcaaaccgttcaaatcgtttgtggcgctgctaatatcgcacaaggacaaaaagtgattgtggcgacggtgggcgctgtcatgccagaaggtaaaattatctggcctggtcaactccgcggtgttcaaagtgacggcatgatctgtgcagcccgtgaaatcggggttgctggtgctcctgctaaagggattatggtcttgccagatgattgggaagtcggtcgtgaagtgacagcagatgcagtcgcagccctactaaaataatccatcttacgattttgttatgggattattaaaattaaaatagtatgataatagatagcaattaattggttaaagacaaaccctttaattgttatttcgttttgcagtcaattaagcagtaaaacacaaaagaggggttaaacatatgtgtgggattgtcggatttgctggtggattatttgatttaccaaagaaaaaagaagtattgaaccaacaaatggacgtcattaaacaccgtggaccaagtggtgatggtgattttatcgatgataaagtcgcattaggctttcggcgtttatcaatcattgatttagcaaagggtgatcaacccatttataatgaagaccacactaagctagtctttttcaatggtgaaatttataattatcgtgaaatgcggactgaattgatcgcacttggtcacgactttaaaacagattcagatactgaaaccattttgcatgcttacgaagaatggggtaaagaggttgttacaaaattgcgtgggatgtttgtctttgtcatctatgacttacaaactaagcaattatttggtgctcgtgatttcttcggcattaagcccctttattacacgactttagcagatgggactttcatgttcagtagtgaaattaaaactttcatgcgccatccagaatttaaaccagaactaaataagacagccttaaaatcattcatgatgaatcaatacaatgatttacaagaaacgttcttcaagggtgttttcagattcccagcaggccattatttcacttatcaagatggccaattggacatcgaaaaatattgggatatgtcatttaatccttcaaacttatctttcgaagaagaagtggctaagattgatgctgcagttgaagaatccgttaaagcccataatgtggctgacgtaccagttggggctttcttatcagaaggggtcgacagtagttatgtcacaagtattttgcaaccgcaagaagtcttcagtgttgggtttgatgatcaaacctataatgaagtcacagcagcccgggcgcttgccgatgaattaggcttgaacttcaatgaaaccaaagtgaatgccgatgatgcgtttgctgaatttgacaaaatccaatattacttggacgaaccagatgggaacccatcatgtgtgccattatggttcttgtcacgctttgcccgtgaaaaagtaacggttgccttatctggtgaaggggccgacgaattattcgctggctatgtcaactacggcatgcactcccacaattcaacaattaaggccttcacttctggcttgaagaaattacctaagggtgcgcgtgccagtttagccaaagccgttaagaagatgccagccttcccaggtcgcgtccatttatacacgaatttggcgaacccgcgtgaattctatacgggtcaatctgtgatttttgatatcgaaaatccaagtatttttggggcagatgaagccaatactttcttgaaacctgcttatcaaaatgatggaacgattcaagcaaactatcaagctgattttgataacgttgcggatgctgatccagtctcacaaatgcaatatatcgacttacatcacttcatgttaaacgatattttgcaaaaggctgataagatttcaatggcgcacagcttagaattacgcgtgccgttcctggatcctaaggtggctaaggccgctggtgaagtcccaactaaatacttaattaatagtcatgatacgaaatacgcttatcgtcaagcttctgctaaacatttgccaacagcttgggctaaccgtcctaagttaggtttcccagtgccaattaagcaatggttagaagatgacaagtattatgaaaaagtcaaagcactctttagcgaagatttcgttgcagaattctttgatcaagataagttattggccttgttagatgccaataaagaacaacgcattaacggccgtcggaagatctggaccatctttaccttcttaacatggtataaagtctacttccaaaatgtcgaagattatttagcattaggctagagtgtgacctatagaatccgtttaagtgcagccacaaaattaatttttgtggctgctttttttgcgttttagagatcaatcaattgataacagagaaaaataaacattcattatttagctcaaacccgcattatggtaaactataagggattagtttaatcatatagataattgtgatttattgaaaagaggacgtttaaaagatgataacaaatgatacagtttaccattttgttgggattaaaggttcaggaatgagtgctcttgcacttgttttaaacgacctaggctatcaagtacaaggctcagatatcgatcaatatacgtttacacaacgcgatttagaacgagcaggaatcaaaattctgccattctcagaaactaatttacacgaaggcttaacggtgattgccgggaatgctttccaagatgaccaaattgaaattaaaacagcccttgaaatgggcttgccagtcgttcgttatcaccaattcttaggtgaattattgaaagactatacaagtatcggcgtggccggtgcgcatggtaaaacaagtacgagtggcttattagctcacgttttaagtggtgtggctaagacgagttacttagtcggtgacgggacaggtaaagggattaaagatgcacaattcttcgcatttgaagccgatgaatatcgccgtcatttcctagcttattcaccagattatttaatcatgacgaatatcgactttgatcaccctgattattacacaggcttagatgatgtgtttgacgcgttccaatcagaagcttacaaagttcaaaaagggatttttgcttggggtgatgatcctgaattacggaaaatcaaagccaatgtgcccgtctattattatgggacacgcgaagatgacgatttccaagcccgcaacatccaacggacggtgcaaggttcagaattcgatgcttactatcatggcgaaaacatcggccattaccacgtcccactttacggtgaacacaatgtcttaaacagtttagccgtaattgctgtcagtcatttagaaaaaattgatggcaaagaagtggcacgcgaattggcagacttcaagggtgttaaacgccgctttacagaaaagaaagttgctgacgtgacaatcattgatgattatgcgcaccatccatcagaaattaaagccacattggatgcagcacggcaaaaatatccagataaacaaattgtagcggttttccaaccccatacgttcacacggacaattgcgttaatggatgattttgccgctagcttaaaccttgcggatgaagtcttcttaacggatatctttagttcagtacgtgaaaaagctgggaaggtttcaagtgctgacttaggtgcgaaaatcactaaaggtggccgcgtcttgaaattagacaatatgtcaccgctcttagacttcgaccaaccagtcgttgtcttcatgggcgctggtgatgtgcaaaaatacgaatatgcttacgaagaattattgagtaatttaagtcctaaagataattaagatttaggcattttgattgtctttctggatggatttgttacaatattcctaatcgggtgattatgggcccgtttagaaatataagaggtgaatattcatggaagaaagacgcgttgtgaatgtcgacagcgaagcccgctttttcagtaaagtgtatggtttgatggctgtcggtgtcggaatttcagcactgattgctgttttaatggtgactgtgtttaaagcacaaacttacacaatcctatcaagtggtagctcgtggatggtttggggcttgatgattgcagaattaattttagtcgttcagattagtcggcgttcaatgaagaatccaacggcctcgttagccatgtttgtggcatatgcggcgttgaacggattgacgtttacggccgttttactggtgtataacattggtgaaattggggcagctttcgcatcaagtgctttagtgttcattgccatgtcgatttatggtcgcatgacaaagaataacttaagcggctttggcaagtttgcaatgatggggttaatcggtgtgattattgtctcattggttaacttcttcatggcatcagctgcaattagctacttcttgtcatacgctatgttaattatttttatcattttaacagcatgggacaatcaaaagttaagtatgatgtaccgtcaatacggcgcaactggtgaaatttcggtttctggtttagctgttatgggcgcattaaccttgtacttagactttgttaacttattcctcacaatgctccaaatttttggcggcggcagagattaagggtttgataacagtcgggatatgactgttatcaaacgtttcaaaagaacggtcatcaggtaaaactgatgggcgttctttttttatgcttgacacaatactatgcataatatagtattaactttcgaaagggtgatcggtttgaatccacaattaaagaaaggcctcttggaattttgtgtgttagcaacgcttaagaaagaggattcatatggctaccaaattatcaaagatacatcgagtgtcgttgaaatttcggactcaacattatacccaatcttgaaacggctcgaggcgcagggtgaaattgaaagttatcgggtcgaacataatggacgcttgcgtaaatatttccatttaacattggcgggacaagcatcgattgatagttttttggccgattggccggcagtgatgggcatttatacttacataagggagtgtaacaatgactaagaatcaatttattaaacagcttgcggcagaattaacgcggtatgggattagtgatgcagccaacacgattgattattacgatgaattaatcgatgatcgactggaagcgggtgaaacggaagcggagattatcgcgagtttagcaacgccagctcagattgtagcgcaattagctacaccagataaaccggttcgccaaaagaagatggcaccgatgttgattattttaatcagtatcttgttagtcttagggtcaccgttatggggcacgttgttattgaccgccatcatattagtggcacttggttatttcttgatttggttaggcccgtttctgggggcaatctttgctgctgccggcattcttggtgggagtgtcagcttagttttatcgttctttgttggcttacaagaaggctggataattgcggtgatgcagcttggaattagttttgtgatggttggtgtggggctgatttgtgcaggggcgacctggtacatgacgaaatacttaattcgtttctcggttggaatcacacgctggctggttgggatgttccgtagtcgattaaaggtggtggcgtagatgttgaaaaattggttgaagattagtttatgtatgattcttgtgggaattattttaatgaccgttagttttgggatggcggattttaaaagccaaccattccaatatcgtggcacacatgaatggagccggacgtttaacttttaagataaataaaaagaggtgccgatgatgataatcgacacctcttttgtttgttattgaccgttccatggataatcggtactgatattttgattgaaatgtttttgactttgaaaatttgcgaggcggtgggcttttcgttcctcataaccggcacagatgaaccgttcttccggtgattcgggttgaatgttaggaagggccggacctttttccatcgtgacaaaggttaagaaggcagttagcccgaggaatcgttcgccggtcttgagatgttcaccgataatcttagtaaagatttcaattgaacgggtgccgacaccggcaacgtaactttcgatgcacaaggaatcttgcattttgaatggttcaatgaagttcagttggtcgatactggcagtcacggtttcgacgcgcgctaagcggctagctgaaatggacgccgaaccatccaagagttcaagcaagcgtccgccatagaccgtttcatgttcgttcaaatcattgacgaagacgcgatggttactgatggagagggtttgacgacaggtgatgagatttgacattataaaaagactccttattaatcatttagatgggggacaatcagttggctagcagccaagtcgacttggtaaacgaatgcttgctcttcacgaatcgtcattcccatatcagtcgcgtagactaatagaccgagttgatgtcccgctgttaaatcataatgggtgggttgtaggtcgagcgtgatatcatagaattcgtttggggtgacggcgtcggtttgataactattgtggcgattttggagattgatgtgtcctttagtgatgacttgataattgcttggtcgattgagcttaaattcctttaaatcatcatagcgccactgatagccgagttgttggcctttagcagctaatacagcaggtgtggtgcctaaacggttgaattgaccatagtcaataaccagcacgctcaatagcccacgttcggcattgacagcgacccttgttctaaactgaattcgaccatcaataatgagcggttcggtaagcggggagcctaagaaacgcaaccggttgccagtgaaacttgattgatctgcgattaaggcatcttgccaagcggctgtactgattttttgggctctaaaggccgcaacaccgtcatctttaaaagtcgtcagtggggcattttcggtagcattagtgcttaatgtttgttcgtttagccagaaagtcgtagttggattgttaggggctagccaatccgcctgggtcgtccaagtggcttcttgtgcgttgtcttgaattgtaacagccggtaattttgtgacagcctgattctcaatgccgagtaattgatgcgtgaaccataagttcatcatatcggtgaaatcgatcgactgaatgttattcatatagatatgttcaccttggtgtaagaaaagcttcttattaaccggttgatcgcgcaataaatcccataaggcgccggcattttgtagtttaacgttccaatcatttaatccgtggactaagatgacgtcacaattcaggttggcgagattgtcacgatagttacgggctgcccagaaggcgttgtaattgcctgtgatgcgatcttgaccttcttgtagggctttgagttggtcggcgaagaaagtgccagagagcgcgtgatcagcggcatctttttggcgggtttggcacaacttcgctaagacgtcggcatcttcaccctgacaatcaattggggcgaccactaagccgttttcgcggtagtaatcgtaccaactggaaatggcggcttcagctacaatggttttcaggccttcaacgccagttgttgcagcagcagtggctaaagtaccaaggtaggatttaccagtcattgcaacttggtgattacaccaccaagctttaatttcaatgccatcggtgcggttggtgaaagctcgtcgattaccggctaaccactcgatgatggccgtggttgaagctgtttcttcaggtgagccacaagtccggacgccgtcggaaccgcgtgtgccaatgccgccagcgtaaacgttcgcaaatccgcgcgccagaaagtaatcatttaaactgtaattgctgtcatctgttgcgtttaattcagttgtcatacttgtgccattaacggcgcgaggttgaggaagcggtgcagtggttggcgtttgggttaaatcagctaagcttggttgttgaacgggtttagtcgcaattgtagtatcaacattgtgcaaatcagcatcgacgtcgttaatccccttatagtaaggactggcagtgtagagtgctggaatttttaagcctgcttcagtttcgcgtggtctgaagatagtcgtttctaataagtcgcgttggccatcttgatcagtatctaggctcgattcaacataaacgacttctcgaattaaatggctggtatcgaaaacgggctggaccttaccattgaagatgagaaattggggctgatcactttgccagtctgcaaaaaaaccacggttagccaattgatccagataaagtaacccagtttggctacgcgtcgttaataggagataaagggcttcgatgaaagtggtctgatcaaatgccgcttgatcgataaatgggagttttgtggcggccataaaagcagtgggttgatcaagttcaaaatcggttgtcatttcaaaacccaagagttggagggcgacattatagaagacaacttgatcgaatgaagtatcaatggtttcaaggtaggcggttagatttaattcggttgtggcttgtaataaactaagttgcccgctctgggttgattgactatgtgcttctgggaacagccgttgaaaaacatcttgggcaaggacttggaaggggagctgggtgaaatcctttgggagtaaatgaatacgctgtaattccgtgatttgttcagattgagatttagttaagcgtgcaaactgatttaattgcatgtttttccctcatttctgcgaattttaattgacagtgactacttcaattgcttataatatagcatgttgtgcggtattctgacagcaaaaaccgtcaatcaatgaggtcatagtagctcagctggatagagcaacggtcttctaaaccgtaggtcgcgagttcgaatctcgcctgtgacattcaataattcttggagacatctaatttcgcacattgcttgcgaggttaggtgtttttttaatgatggagtgaatgtaaaatacaagattatttaaaagcgcatcaaacatggttagttgatttttatcaacaacggaattggtatcggttttcaccattaattcggttgaacttcttgagtgaagaacttggggaattgtcacgggccgttagaacgattgaacttgggcgtgatcacccaggtgaaaaagttaaaaacgatgctgaaaagcaagctaacttaaaagaggagttagccgattgcttcgaccaactgctcattatctgttcgaaatatgaaattgagcctgaggaattgatggcacttagcgaggcaaagtttaaaaaacggttcgaaaatgattagaaattaaatatttaaataaaaagtttatgcgctttaaagcctattttaatagtcttttgcgaatgaattgcgagcgatttagtcgatagttttgggatgcgggttgctaattagaaaatgccatgctatactgttcaagtaatcaaattttgaaacgtaatttgagttttggatgcacaataccttcctcttttacctatcaataatttattgcaacaaaaaacgtacattgatatgtatcaggaggaaattattatgaacaacggcacagtaaaatggtttaacgcagacaaaggttttggttttatcactggtgaagacggcaaagacgtatttgctcacttctcagctatccaaggtgacggttacaagtcattagacgaaggccaagcagtatcatttgatgttgaagacagcgaccgcggtcctcaagcaacaaacatcgttaaactttaatatttgtgccccgcatccgcggggtttttttatacaatcaaataagtaaggacctgagacaaaaactgtctcaggtccttttttagtttagtggaaaataatattctcatgttgccactaatgataagcgattttatagtcccaattactctgttaaatactgtaacaaatgcttttcggcattatcatagttgtattgccgagcattgagtaacaccaagttgcgatcattatcaaaaaaattaccggtgctctgcgttagatcgggatggagtgctaagtattttccaactggcacttcagtatgcagcaatgtttgggaataatgcggtagctcatccgtgacattccctgggaaaaatgaattgaccgtaatctctttttcagccagaagataactgagaaagagggttaataaagctttatgggttaataaccaccttgcacgttgtaaagtagtctcctgttcttcgcaaatgctgagttgttgaatgatttgcggatcaccggttatgataaggacgcgaccgccagttaatcggtctgctaagcccattgttagctgataatgggggactaaattagccttaatattttcttctgctgagctggggaaaacaccggcagtgtgcactagaacgtgtattttatccactttatatttgatgcttgccagtgcttggttgcgtcctgatttggtcgctaaatcggcttggataaaaaaggccgcttttccaagttgggccacagaagcccggccttttgccgcatcctatccgatgataatgacttgatggccttctgcaatgagatctttggcaatgcgatagccaatcccagatgttccaccggttatgacaatatccatatgtgacagtcctttctttttcaaattattatttaagttgattgatttagaaatgagtgcatgagatagctattaagtgctttcgttaattaacttagggtcagtatatattaggctttttagagataccaattctttaactcgaattcgtgcaccatcgacggtactatagctattaacgatatgtcttttgtttaggcagttaaattgtcaaggtcctattgggttcagtatgatgaacatatagttaggattcgcattcatttcattaataggagggtgttgctaaatgattacaacgtataagaaaattttagtcggggtcgatggatctgacttagcgaacaaggcatttatggaagctgttgaagttgcgaaaagaaatgatgctgagctttatgtggctcatattattccaagtacagtctatgtttcaccggatgctagtgtctatgcgaagatgacggcgatggaaaaagatcgtgtgaaggagcaactagcggctaatattcgttacgcgaataatcatgggctaacgaaggtcaccccgattctggaagtcggctcaccgaaaaaagaaattgcgattcgcattcctgaagaatatgggattgatttaatcatgttggggattacggggaaaggggtcattgaacgaatgatgatgggatcggttgcccaatatgttagtgcccatgctgcaacgaatgttttattagttaaataagaacgtctggttccaaaaaagcggtcacgacattttttgtcgcgaccgcttttttgcgtgtggttagatgacaataatgtcactgttcaaatccaaaagcgtattgtacattaatattgtaataaattaatggatagattagaaatttcggagggacagttgatgtcaaaaaaagggcgtcaaattggtggtgtcattggtattctggtcatattcggtctggtagcgggcggaattgtggttcagcgacaacatcaccaacgagaagtaaaaatcgcgcaacaacaagccaagattaagcgccaacgacaagcgcaagaagcaaagaaacagcgcgaatcacaaaaagtcgctgctgctaaagcaaaggaagaacgacttaaagcagaaagccaaccgacaattgttgcagaacaagcgttagatgactacttaaagcaaattggcttttcaggtaccgcgttaattgtccgcgataagcaagttttgttggataaggggtacggcagtgctaatcgggccaagcagttggtgaatacgccagatacgctatatgcgattggttcaactgaaaaagcgttgattgcaacgagtttattgcagttacaagaacaaggaaagctaaacgtcaacgatccaatcagtcggtacctcccggactttccgaatgggcagcagattaaactgactgattttttacatcatacatcaggcattgtcggtcgggaccaagataatcagacgaagactctcgaccaattaatcgaagaaattattaaaaatgggattaaggaacaaccgggcaagtggcactatatggatgcgaactatattgtgctgacgaaggtttttgaaaaagtgagtcatcaagattacaaaacgtatctaaaagaaaaaattctaaaaccaagtaaaatggcgcacactggtttcatgacggatcaatattcgcgattaccagcggcttccattggctatctggcaaatggcgctgcgggacaactccccaatttcacgcaactaccaggggtcggagatatgtatatgacggcgactgatatgtaccgttttgaccgcgcgttgtggactggaaaattaattaatgaacagagtaaggctcaaatgttccaaccagggagtacgtcccactatggaatgggcttttacaatgatccagcactcattattaaccgtggttatttgtcaggctggaatgtgtcgaacggatttagccacggtggccgaatctatatcgtgttattttcaaacgaaaagaacgaaaaggtttcgctcagcaagatgaacggtgaattatatactaaaataactgcaacgatttaagggttttgttccttatttagttgatacggacagcgcaacgataaaatcaaacctggaagaactgtacaaagaacataaagaggataatttggttttccgaaatatttttttataaatattttttgaatatttattcaatctcgtttgacccgttatttcgttagcaatgagcttttctctcgctgacaacatagaatactataccaacaatccaagacatcgtcaagcgattgtttacttttttttgaataaaaatataaaaagtttcaaaagcgtacattgttgaatagatattcaccgattgtccgaactaattcaagtgcgggacactcgtgacttctaacttatccagtaatttcgtgaactcactagggttcgcaaatcgaaaaccggcttcactaattattctcaattgttcggtataaaaatcagtctcatgagctccccactgaaagacaaagaacgaaacgttctcaccttcaaggttaatattcgctaaattgatcaatctcaattcgttaacatcaatatttagctgtgcttggattgcaattaatacagcagcaagtggtgtttgatcatcttgcttattggtcaccagcatcttataagaagcatcaacttgtggttggaccaaaaaatcatattgtccttgctctgtcttatacataatcgttccggctactttagcactcatacattctcacccttattcaagtcttctatcgcttcttcagtccatcttggtaatcgttctgcaatgggcgcaaacccaatatgaatccggcgatttgtccaatagtgtttcttagcacgctgtggtgctaaatcttgtgctttatgtagcgcacgtaacgacaaactaatcttatgtgtgtattcatcgatatctaacactaatacatctaacacttgaccgactttaaactgttcatctaacgctttaacaaaaccatgaccacattctgagatgtggattaagccttggaccgttgcatctaatgaaacaaatacaccatatggttgaatgcctgttacagtacctgtaatcttttgtccaattcgataacccatattttcctccatttcaatattcctatctattttaagccttccagttagtaaaaggcaagctatcggctaagaccttttatacaattccttctataatatgtaaaaagaacctgaggaaacatccctcaggttctcatttaactaaagttgatcagctgctagtaaaagtgccccagtaatcccagcgtcatcccctaatgcaacatgcacgatgtagtcatcaaggtcaggcgtttgcacataacctgccatttgacgtttaaaggattcacgaatcattgggaatagttgggcttgtttcgacaccccaccaccgaagacaattcgttctggcgatagcattaaagcaatatttacacaggcttgagctaaatagtcagcttccatttgccatgcttgatgatcagccggcaataagtggcctttcttgccccaacggcgttcgattgctggaccagctgctaagccttccaaacaattgtggtgataaggacatgtcccttcgtatgaatcttctggttgttgccgaattaacatgtggccgatttcaggatggctgtaaccttgtaaaatctgaccgtgttcaacaacaccgccaccaatccccgtcccgacagttaagtaaacacaactatcaagtccatcagcagcgcccatcttcaattcaccataggctgcggcattcacatccgttgtaaaagcaaactgggtatcaggataatgagctttcattgctcctaagatatcatagtgttcccaccctgctttgggtgtatcgatgattgagccatatgtttttgatttcgggttaacatcaattgggccaaacgatgccaaaccaatggcatctaaatgatcgaattgatcaaaatattcaaataaccgtggcatcgtttgttccggcgtctcggttggcatactaattcgttcttgtatcccattttttccatctgttacggcacagacaaacttcgtgccccctgcttcaattccacctactagcatctaaaacacctcttcaattaaaattaatgattaatcgtaatgtgattgatgataacttcttcaactggtttgtcttgcattcctgtttctgtagcgttgatcttattaacaacgtccatcccactcaagacgtgaccaaatacagtatgtttaaaatctaaccaaggtgtaccacccttttcataagccgtaatgacttcttctgggtaaccagcacctggcatttgtgacaacatgttttggttgatatgctcgtttgttacgatgaagaattggctgccgttcgtattaggaccagcattagccattgataatgcaccatttaagttaaagacttcttggttgaattcatcttcgaaaggttggccccagagactttcgccacccatcccagtaccggttggatcgccaccttgaatcatgaaatcgttgatgacccggtggaaaatcacaccgtcatagtaatctttttcagctaagccgataaagttttctactgtcttaggtgcttggtcttggaaaagtgctactgtaaattcgccacggtttgtgtcaaaagtagctgttggccctgcaaagtttgcaaggtctaattgtggatatgtcatttaatcgtcctccttgttttgactcacaatcattatgatagcgaattgcttcataaattactacgattatttcattaaacatgctttccttatttttttctagtatactaatttaagaaatctactattaaggaagttatctcatgcttgattcaaatcatctctttgatatcaccattattggcggcggtcctgtcggaatgtttgctgcctattatgctggtatgcgcaaggccgatgttcagattatcgaaagtctccccgaactcggtggtcaagtcgcaacactctatccagaaaagcaaatctatgatgtcgctggtttcagtggtatctctggtgcacagctcaccgaaaacttaattgaacagctggcacttttccaaccaaccttgcaattatccactgctgtgcaaggtatcgaaccccaagaagatgggactttcgttcttaaaacaacgaagggcacgacacgcaccaaaggcatcatcattgccgttgggaacggggctttcacaccgcggaaactcgctgtcgattacgatccagaatgggaaaatcactatattcactacttcgcaaaagaaatggcgcagttcaaagatcaaaccgttgccgttgctggcggtggtgattcggccattgaatgggcactaatgctcgaaaaagtggctaaacaagtctatttaattcaccgtcgggatcaattccgcgggcttgaaagtagcgttgaagcactcaaacaatcaactgtccaaattaagacgccgtttttaatcgatagtttgaccgaagtgaaccaacaactcgcattaactttaaataagatgaaatcaaccgatcaagagcagctaacaattgacaaactccttgttaactatgggtttatctctgatactcgaattctccgtgattggggattaacattggaccaccatcaagtcgctgttaaccaacaactcgagacgaacatcccgaacatctatgcgatcggcgatattgctacctaccctggtaaagtgaagttaattgccagcggatttggtgaagcaccaatggctgtgactgagttactaacgaatctctacccagaaaaacgccaaccactacacagcacgtccattatgtaagagtgcgcaatatgcccgattaccttctgaggattagcctagtccagtaaattagcgacgcagtcgatgatttactggccgtagctaaccggaagaaggtggcttatggagcacgtttcgataagagtgctttaactagcggttagcttctgagtatagcatcggttagtgaatgagccgcacagccgaccgtttgcaaaccgtggctaaacggaagaagttgctagctaaagcacgttttaaaaaagccctgcatcaacgttttaaccgttgatgcaggactttttagtattttattaagcattattttttttcatttgactcttaaccgctgtgataaccatcggaatcaatgagaccccgataatccctaacacaacgagtgagaaatgttcacgcacaacagcaatgtttccgaagaagtaaccagctccgcaacagagtgtcacccacaagatactcccaatcacgtcgtaacggaagaacttcatgaaggccatctggctcccaccggcaacaaatggaacgaatgttctaataatcggcatgaaacggccaattgcaatggttttaccaccatacttatcaaagaagacctgcgcctcttcaattttctcggtattgataaacttgccgaagaaccgattcttcgtggcggctaaaccgacccgttggccaatttgttcattcaatgaatcacccgcaattgaggcgattaagaacaaggcagcaaacagccagacattcaagtcattatcagtccgggctgccaaagcagcagcggcaaataaaagcgagtcccccggtagaaacggtaagataaccgccccggtttcaacaaagataatggcaaacaagatgacataggtccagttgccgaactgattaacaatgttgaccaggtgggcatcaatatgtaaaacaaaatcaattaactgcgtcatgcgatttctcctatactctttttcaatttaaaaatatatcccttattaggataccgaatccatgcatcaaagcaatcacttttgcattttcttaataaaaagccaaacgttacagcgcacgtttaccgcgccataacagccaagcaaaactaccctctaacaaaatgaagaagagtgcaaaacaaaggccaaaatagacttccggtaacactaagataatcggatcagtgattggatcaaactgccagttcagattgcgaaacaataattcgtggaacgtaatgaaaaaccgatcgaaattcatactagcaataaaccctaatatgggtggcaccacaagagcaacttgcattgggcggacgtattgccaaacccgattggtcttgcgccgactccgccaatgctgaatcgccgctccaatcgttactagccaaataactactgctaaaccaaacaagcgtttcacttcaacaaaatgttgccgaccatccaatgacattggaaagtcaggtagttgtaagcgtggttgccatggcacaagtaagtagcccattaaccggttaaagttcatcatcagccgcggttgcgttaattcccgttgactcgctagatcgaggtagtgactcactagcggataaagtgcccagcttaacaataacgttattaaaatcgcactgctgactaacgccaaatacaacgccgcccaactagtggtacttctaacccgctttaaacgtcccattcggttaagtcgttaatgatatgcgttggttgcaaggcttcttttgccacatcctctggcgttgaaacaccagtgtaaactaacaacgtatccatccctgcattcaagccagccttgatatctgtattgtagttatcgccaaccatcaccacttgttccttcgtcaagccgaattgctctaaggccatttccataatgattttttcaggcttaccgatatagagtgcactttgttgcgttgcccgttcaaccatcgcaatcactgaaccagcacctggcactagcccgcgttcgtttggtaaattcgtatccgcattggtgccgatgaataatgcaccgcgcttaatcgctaacgttgctaattcaaacttgtgataagtcacatcataatccaaaccaactaccacgtagtctggatcgaattcattggttctaaaaccggcatctgatagagcctgcttcaaaccgagttctccaatcacgtagaccgttttgccattcgctgtaccaccgtttaaattcaatagatagcgcgccgttgccaaagaaggggtatacacttggtcaactgccgcatgaatgtcatggttatccgccaaattctgaatcacagcagctggtgatttcgtagtgttgttcgtcaaaaacatgaacggaatttgttttgcttgtaggcgttcaatgaaatctttggcttctggcatccgatcacggccgcgatacacggtgccgtctaaatcaattaaataccctgcataatctgtgtttgtcatagttgtctaactccaattacgttttactttttattgtgttccaaaggacggatcttaaaatgacgcttattaactgatttttgattctcggttaccgccttttgagggcgttctttagtcactttttgcttgttatcggtgactttccgttctgtaaaacctggcttttgacgccgacgccgttgctgaccacgttggcgattactccgccgattctcattcttaatgattggcttgccttgacgttccaaaacaaagtaggcacaaccaaagttgcagtattcgtatagataatcttgtaacgtattgattaattgatctttattagcgcgtttgttggttgctttataaaagcccttcaaacgcagttgttcaaagccccagtcagccacaatataatcgtacttagccaacacttcattatagcgttcgttcaacttttcagcgtcgaagccttcacgatagttcacaacgacttcataagcacatttatcaatctcaagcgtggtttcagtcttcatgacaacgtgttgtggcacttctggttgtttggctgaagcgatcatttctttttcaatcgccttggtcactttcttggcaatcttgggactgtttttcgtatccgccacagcgaacctcctcttcccttataagggataatgtttacttaaatatttagcgaccgcgtctctgagaaaatcagggaacacgatctcggtctcgccaacaatctcaattgttggaaagaatggaatgaatagataatgatcgacggtcgtcaacgtatagctggcttctggatcaatttcttgcccatgccaaaagacgcgccgcaatttcatatcaaccgctatcccgtcataaacgatgtctccaaagattttaccacggaaactcatccctttaataggaaacttgcgtaaaaagagccggtttttctccatttcaagcaccatccgccacaaatcataccctttgagcgtcactttaatcagatgcattggatgcggtaattgagtttgcaaatcatctttagtaacaatcccagcctgcaaatcttgcaagaacaagccagtattcaatacggcagcttcagtgctggtcgcttcttcaattgcctttaaaccggtcgtcatcatttctgattcaccaattgcgttgattttaaaagcgtgtggcaacttggcaacatgctcggcggctaattgtgcgtgcccctttttcaggtagccttcaatttctgctgcgtcagtcttcacaactggtaagtccgcggttaaaaccgtccgagcacttttatgcatcacatggtgctgatcatccagttcaagcgtgatatcaccaaggtaatgaccgtacttctcggcagccgtcaataaggtttgattaaccagcagcccctcttctaaaagatgatgcgtgtgcgcaccacagacgacatcaatctcagggaattgttccgccagccacttatcagtcgtaatcccaagatgtgataggacgattaagatgtcatattgaccttcaatcgccgctaattgccgcggcaactcttcactgacagtcgtcggttcccaaccattcggccgataagttaagaaaaatggtgcggtcaaggcaataattgctacccgcgttccagcatcggtcgtcattagtcggtaagattgcgcaaatgctggcctttcgtttgttgcttgttcatacagattagccagtaataccgggaaattcgccttatcatacaaatgttccagatcagcatgactattaccgattccttcattgtttccaatcgttactccgtcatacccaatttgattgagtaactcggtattaatctgaccattcgttgcttcagtcaatggatgactacgatccattgcatccccgatgtcgaaggtcaagaccgtatccccttgctttcggtatgctgcttgatgttctaagaggaagcgccgcattctgggccaattttcaaaatgtgaatgtaagtcattcgtgtgtaaaatatgaattgtttccattttgcttactcccttcagctagtcgtggctggggtttgccagcgcggcttgtttgcgttcaaaaatgatttcaatctcatttgccgcaaggggtgttccaaacggcacccgttcaggtaataattcgcgctctggtgcatcaatcccgacattgatattctctgcaatcggcaacatataatgatgaatatgtccgtgcaagttgaacgtctgttggacctttcccaataataacggatagtgggttaaaaaatactgatggtgattgatcttaattagctcaccgacatcagcaaattgataatgcgccttgccagctgataatcccgcatcatgtttcgccaaatatttcaaaaaagcacggttatcatgattacctttaataataatcagctgcccattcaactgctctaacacagcagcgacttcagcaaaagcactcggcttattgggcaccattgcgacgtcacccaacaaataaacctggtcgtcagcttgcacccgttgattccagttagcaataatcgttgcattcatcgtagctacatctttaaacggacgcggcgcaaaatcattattacctaataattcggcgtgaaaaaaatgcgtatccgctgtgaaataaatcattcacaatcccacctaaccaatatgatttgcttttaaaatctcctgaaaggcttgcgcaactgcgccgtcttctttttcccattcttcccagtggtcaaaatcaaccgcaggcattgtgtaacgttcattaatgtaagcttcgtaagtttggaccgcattcgaatgcggaatgttgagttgtaaaatccggacttgcttaataaatccccggttagccgctagttcggcacgcccattcataaagatgttagccaattcataatacgttgtgccatctaagcgcgtaatttcttcaataatatcaaatgtttggtacttctccgccattgtgttacttcctattctagtccgatttcagttacgtttattctaccaatatgtacacaaaaaaaccactacccgcagatagtggttggcataagagagaaagagaattgataaaaaggtaattgcataagtaccttacaaacataatataccgcctaatgtaagcgttgtcaattgttatttttaatttatttatccgtttctttaaagttctgtaacaatcgtaggcatttgaaaggaataatggtatcttaaaaagagtagtttttatcaattgaggaggccattgatttgtcacagcaacattcacgatgggggcttttagtattaacaagcctttgtttctggtttttaaccggttttaccgttgtcgctcatcgtggcgaccccatcaacgcacccgaagaaacatttcaaagtatcgacatggccttttcgcaaggcgctaactatgtcgaactcgatttacacgaatctcaagatggcgtcttagtcatctcccacgaccgtaacttacaacgcgtcacggggaccgatgcgattgtttcgcaaaatacttttgccaagctcagtgaactcaaaatgagtaacggggaaccaccacacagcgtcgatcaattatttgagcactatcaaaacaacccaaatgcgaaattcctcatcgaaaccaagaaaaccaaaaagggaaatccgcaggacatggaagcaaaactcgtggcgctgattcaacaatatcacatgcaagaccgcgttatggtccattccttttccctcgctagtctgcaaaacatgcaacgtttaatgccagagattccccgcatttttatcgttggcagtttacagcggatctcattcgagagttttaaatacgccgacgggattaacatctcatcatccctcgtcaccccaaccatcattaaacagctccattatctccatcaaaaagtgtatgtctggaatgagatgtctgaaaaccaagcgacttggaactggttagtcaacctaaatgtcgacggcgtggtcacgaactatccggcactgggacgccactatcaggccgcacaggatcaagcagaaagtgaagccatcgacacaattgggcaagtcaatgacgttcaagacctccccaccgttgaaaatccatatgaaccaaccctcaataaaaagccggctaaagcgggccatatctacaacatcaccgaagccgttacaattgccgatcaaacttactaccgcattggcactaaccgctttgtcctcagcgacagcatcaacgtcggtgaaacagcgaaagccgctgctttattggtgggtaaaacggcgcagattaaaccaactgcgaacattgtcgctacttggaataatccgctacaccccacccagacaaccggttatcttagtgccaattcacaacagcaaattttaggagtgcgctatgttggtaatcaagtctggttgaaagtcgctagtggttggttcaagagtcgccaagcattaatcgacttcaacccaaaccaatcgctgatggtaacccacttttaccgtgaaattccccaacaattgcggccaaccaacttactgattaacccagcactgccactgcaattgccccaacaaccaccagtcgacacgcaactgtttaaccagtttgcccgttctctacaactaactaccattaaattctaacgaggtcaccttttatgacatccgattatgaacaattgattcgttccgtccaaaatactcttccaaaggaagaaacacttgatcacatctcaattctttttaaaatactaggcgataaaacacgcgctaaaatcttgtacgccctctttcaatccgaattgcgggtgagcgatattgtcagtgtgttagagatgtcgcaatcctcaatttcacatcaattacgtgcactcaagcaagcgaaactggtaaaaagtcgtaaagaaggcaaggaagttttctattcattagctgacaaccatgtcatcaatatcttttcgcaagttatcgcccacgtcaacgaacactaaggatcctattgacaccgatcaaattcactttggtcggtgctttttttaatgtcccaaacccatcatctcgattgcattctatcgtgtttggtggtatcttatagtcaacatatgaatatatgctcatatgtttgtttatttagtaaagattacgatttagcttttcactcaacaaggaggcctaaataacatggcacaacttcaattaaccggcatcgattgtgccgcatgtgctactaaaattgaaaagaacgttaacaagatggccaacgttaaaagttgctccgtcaatttcaccactcaaaaattaaactatgaactgaccggccaagaagctgttacggaattcgaacaacaactcgctactcttttgccaaccattgaaccagatgtggggattcaacaatcaccaaccccagaaccatcccccgcaaaacatgcgattaattatgatctcatccgaattctcgtcagctctttaggcttggcgatttcttatcttgtccctctaagcgcgccagctaaaaccacgttgctcctagctgcctttgtagtcatcggctacgatatcgtctggaccgcaatcaaaaatattctccacggcgaatggttcgatgagcatttcttaatgtcaattgcaaccattggggcctttggaatcggacaatatgccgaagccgttggtgtcatgttattctatcaagttggtgaatatttccaatcattagcggttaatcattcccggcgctcaattgctaacttagtggcaattaaaccaaccatcgccaatcggttagcggctgatggcaccaccgaagttgttgcacccgaagcaattcaggttggcgaacacatcgtggtgaaaccaggggaaaaagtcccgctcgacggtgtgattactaccggcgacagttacgtggacacctcagctattaccggtgaatctgttcctcgcgcctttcatcctggtgatgaactactcagtgggacgattaaccaatcaggtttattaacgcttgaagtcacgaaaccttatgctgattcaaccatcgctaagattttagaccttgtcgaaaatgcaagcagtcaaaaagcgcctactgaaaacttcatcacgcggtttgccaaagtctacacaccaattgttgtcggcattgcagccatcatggccattgtaccgccccttttattcggtgctccatttggcgattggctctatcgggcattgattttcttagtgatttcttgtccatgtgccctcgtcatttcaattccactcggctttttcgctgggattggaacggcttctaaaaacggcatcctggttaaagggagtaattatctcgaagctttaaacgatgtccaaaccgttgttttcgacaagactgggacattgacccaaggtagtttcagcgtcaccaccgttcattcggtcgatcaacaacctgatgaacttttagcactagctgcccttgtcgaacaacactcgacccatccaattggtcaatcgattttagcagctaaccaaacgccactcacaaagacgttatctgacgtccaagaaaccgctggtcacgggattagcgggcaactcaacggacaacttttacaagctggtaaggctagttggttacaagccagtggcatcgcaacactcacacctagtgaagtgggcaccagtgtccatgttgcttacaacaaccgctacttggggtatatcgtcattgcggacaccgtcaaaccagatgcacaaacggctgtcgcgcagctaaaacacgccgggattcatcaaacaattatgttgactggcgataaccaacccgttgcgcaacaagtcagcgccgtcttaggtatcgataagtatcaaagcgaacttctgccgcaagataaagtggccgccgtcgccaaactcacagaagaccgcgctaccaacggaaaaatcgtctttgttggtgacggaatcaacgacacacccgttttagcccgtgccgacgtgggcgttgctatgggcgggttaggttctgacgccgctattgaagctgccgatatcgtcttgatgtccgatgaaccgacaaaattagcaactgcgatttcgatcgccaagtacacccgccgcatcgtttggcaaaacatcattttcgcattagtggtcaaaggcatcttcttattattaggcgcctttggaattgccacaatgtgggaagccgttttcgccgatgtcggggtaacgttaatcgcgattttaaacgcacttcggattttaaagaagcactaaccttaaagggttcatggagactttgtgaaccttttattttttaatggcaagcgctttttaaatttgtaataatatgctaaaatgtgaatagattaataattaattaaccgttttttggttaaaatttaacaatgaaagctgggactgcaatgacattgaattggcaacaagaagcagcaaagtataaggatcaaatgcttgctgacttaacaagtttactcaagattaatagtgcgcgcgacgttgaccataaagaagacgacgcaccacttggccctggcccccgcgatgccttgctacaattcttagcaatcgctgaccgcgacggttttacaacaaagaatgttgaaaacgttgcaggtcgcattgaactcggtagtggcgacgaaatattcgggattttaggtcatatggacgttgtgcctgccggtgacggttgggaaacaaacccatttgaaccagtgatcaaagacggtaagatttatgcccgcggttcatcagatgataaggggccttcaatcgcagcatattatgctttgaaattattaaaagacaacggtatcgaattaaacaaaaaagtgcactttatcgttgggactgacgaagaaagtgaatgggttgggatcaaccgttacctcgaagttgaaccaaaacctgactttgcaatttcgccagatgcaaacttcccaatcatcaatggtgaaaaagggattgtgtcatacctcatgactttcaaaccagttgacggtgctgatggcgatatgacattggttagcttcaaatctggtttacgcgccaacatggtgccacaaacagctaaagccatcttaacgggtgcaatgccagctgatttccaagctaagtttgacgcctatgttgccgaccacaagttacaagggacaatcacaactgacggtgaccaaacaatcatcgacttaatcggtaaaggttcacatgctcaagaaccaaaagccggcgtaaatgctgcaacacacttggcaactttcttagctgactttgccttagatactaaaggtggcaactacatcggaacaattgcccgcttaatgcacgaagattcacgtgggcacctcttaaacatcaaccacacagatgatgtgatgggcgacttaacagcatgtcctgcagtcttcaactacacacaagatggtgtagcaacagtgctcttgaacgtccgttatcctaaaggtgtgactgctgaaagcacacgcgacggtttagcaaacacacttagtgatcttgctgacgtaacaattgacggtcatgcacaagaaccacattacgtgcctggtgacgatccattggttgcaacattattaagcgtcttcgaagaacaaactggtcttaaaggtcacgaacaagttatcggtggtggcacatatggtcgtatcttagaacgtggtgttgctttcggtgccttaccagaagaacgcgaaaatgtgatgcatcaagcaaatgaatatatgcacattgaagatatcatgaatgccattgcaatctatgcagatgcaatttacagattaacaaggtagagtgtgacgtaagtcgggtatccaccgaggattaatacaaagttgtgaatgattgcgtagcaatcgtttgcggctcagggttaaccggaaggatatggctgatagaacacatttagcaatcaaaaacggtccaaagcttaatcgctttggaccgtttttttgattgccttcatttatcagcaggcatcagcttaaacgttgaatgcccatctttgacaattgcgtataagatttgttgctttgtttcatcgaagtaaccgagattaacagccatttcgccatcaatctcttcaatcccctcaaaatgttcccgaattatcgaacgaacaaccttcatgttatccatgtgtttttgaattttctgtacagcaacccctagcgtgtagccttcatctaagaaatgcttgataaagatcgccttaatcattgtttgcgcgtcgtactcgcgggccttattgccatccaattcacgcgctttaatgtatcctttttgctcccagtagcggagttgacgcggtgtaacccccgccattttacaaacttcactaatcccaaaaatcaatcgatccgtatctattaactttaaaaaaaggtctttttgcaagtccccactccattcctattattatttttcattatagataatctattgggattgtcaagttaaataacacctttgtcaacttacttgacaaagataccaaatgcgtctaaactaataaatcgcatcaacaaaaacacacaaaggagatttttatcttgtcagacgctagaccattagatattcatgggaaaccatataatcggacagtcttagtcttggtcttattgattggtactttctgtaccgtcttgaaccagacgattttatcaactgctttccccacattaatgaaagcattcgatgtgtccacctcagccgttcaatggctcacaaccggtttcttactagtcaacgggattatgatccccattagtgcttggttaattaaccgattcaattcaaaagtcctctacatgtcagcaatgactgtcttcttaatcgggactattatctgttacatcgcaccaacgagctcatttgcaactctattaatcggccggcttgttcaagctgctggtgttgggatttcaatgcccattttgcaaaccattatgctcaccatcttcccacctgaaaaacggggaacagccatggggatggccgggattgttatcggcctggcacctgctttagggcctaccctttcaggctggattatcgattcatacaactggcgtgttttattcggcatgattattccaatcgtgattctcgtcttagtcctcgctagtttccaaatgaagagtgttattcaactttcaaaacctaaaattgatgtcccttcaattattttatcaactgtcggcttcgggagcttgctttatggcttctcagaagttggcgataaaggctggggcgatgcgctcgttctcacaaccttagcaattggcgttgtggtaattgctttattcatctggcgccaactcacgatggaaaacccattcttggaactccgcgttttcaaatcacctgtcttcacaattgccgctattttaagtggtgtgacgaacatggcgatggtcggtgccgaaatggtcttgccactatacattcaaaacattcgtggcgaatctgccttccattcaggcttaacgttattagctggttccctcatgatggggattatgatgccaattacgggccgtatttttgataaatatggtgccaaacgcttagcaatgaccgggatgttcttattgatggctgcaactgcgccattcatcttcctaacagctactaccccaatcatctacatcgttgtgttatacgctgtccggatgtttgggatttcaatggtgatgatgcctgtcacaacttccggaatgaacgctttaccaatgaacttaattagtcatgggacagctgttaataatactttccgccaagttgccagctcaatcggaacagccattttaatcagtgtgctttctagtgttacaaaaggcaatatgccaagcacacacatggtcaagacattaccattggccttccgcgataagatgattgatgccaccctttctggttatcacgcagccttcatcgttgctgtgattttctgtgtgattggcttcatcatcacattcttcctctcttcaaagaaatctacgattaatgggggtgccaaggcatgatcgtcattacactcgttatcagcacactcgcattattcttttcatcgattttcggtcaaaagatgtggcgaccaatcttaatgaccatctttggactcacatttatcgcttcactcgttttcatcgtccaaaatgatcacaatcattacggaatgaaaactgtgaccgaaactaagacgcacacgctcgtttcaagcgcagatgcgaagggcatgtcaatgcttctctatcacccacttggtaacggcactgaaaaagtctatctttatcggaccgatgccaaccaaagtaaacccaaagcaacccaaactgaaaagacaaccaacagtgttcaaaaaaatgctgataaagcagtcttagtgacaaccaccaaataccgcgtttatcaaaataatacggctaaattctggttcggaatttctggtaacgaccacgaattcgtaagtcgtcacaacacatttaaggttgctaaaggctggttcgttctaagtgatgttcaagctaaacaactcgctaaagcattaaaaggtcaacaagcacaacttaaaactggcgcagaaaatgccggtaaacaagctgtgatggctgctatgcaagccaatccagcaatgactgctgatcaacaacaagcggttgctaaaaaagcagcaatcgcctatcaacaagccgcaatggctaaagtgatggcaacattgaaataatgcaatcaaaaaatcccccacatcgtgatttgatgtgggggatttttttgtggtggaaatgtgctccgtcatccatatccttgcggttaaccctgaatgtcaaacgattgctgacgcaatcattcacgatatgccactaatcctcagagcataaccgcctgctgtcgcactctatttgcttaacaagcttgctgctgcttcgtctacgatgattgtcacgtcgtcgtgtagttgtaatgcacttgctgggacgtctgttgtttgtgggccttctactgtgcctttgatggcttcagcttttgatttgccatatgcgaacaagacgattttcttagcttttaagattgagccaatccccattgagattgcttttgttggtacatctacttcattttcgaagaaacgtgcgttagctttgattgttgattctgttaattgcacttcttgtgtattgctgtcaaacgcagcaccgggttcattgaagccgatgtgaccgttttggccgatccctaagatttggatatcaactgggttatcagcaatcacttggtcatagcgttttaattcagcagaaatgtcgcttgctaagccgtttggtaagtatgatttagtaaatggtttcttgtcgaataagttcttcttcatgaaatagtggtaactttggtcgtcatcagctgataagccaacatattcgtccaagttcacggatgtgcaacctgtgaaatctaagtcgctagccactaatgtttcgtagaatttaattggtgaactaccagttgccaaaccgaatactttagcgttgtttgctaaaccttctttgaagatttcaaagcttttttggccgccttctacttgatctttcactttaataattttcatcatgattatctcctcatcatttaaaaattcaagtcgtttattggtatagtccaattataaacggctaaaatttcaattgcaagccttttgacgctaaaaaacgcgctaaataattggtatacctaacgtttagcgttttcacggcatttcgttaaaagcttacttttaatcgctagcaaacgcccccctttttgtgtctgctgattcaaattggttaaccaattgcactatattcattgattgccgtgcatttctggatatttttcatttgtcttacaaatccgaaatcgggtatgataatgcgctgaactattatataatatgggacagtatgagaaaaaaggtggcgttattatttgaatgatccaaagcaccgttccagtcgatggcgagcactgctccagtcgagcagacaaaaggtctcaacgctattgacatctactaaagacagactcgcacatttgctccatttacccgataaacgttctgcacaaccaactaaggaacaaaaaagagcctacatccaagagttgagccaatcaccactctcttttaagattaacgtcttctttgaagccattaagagtatttttctctatgggatctcaattggcttaatctgtatggcgctcgctgctggaattggcgcgggctattttgctgcgttaatgaaatccgaaccaattcctagttatcaagtgctaaagcaacaacttgataataccgatcaagcagccggtttatactttgccaagaacaataagttcggcgcaatcaaaaccgacttaattcggactcccatcaacatccatgagatgtccccttatctaaaggatgcgattgttgcaaccgaagatgaggatttctataaacacgatggggttgtccccaaagcactcttgcgggccgttatttccgatgtcactgggtttggttcacaaaccggtggctcgactttaacgcaacaattgattaagatgcaggttttaacctcccaagtaacccttaaacggaaagcaaccgaagtcttgctcgccttgcgggtcgataagtatttcactaaaaaagaaatcttacaagactacttaaacgttgccactcttggccgtaacaataaaggacaaaatatcgctggtgttcaagaagcagcattgggcctattcggcaaaaatgctaaggatctttctctagccgaggctgcctacattgctggtctgccacagagtccttccgtctatacaccatatgatcaagacggcacccttaaagatcctgaatacttaaaatatggtctagatcgtaaaaataccgtgttattccggatgtatcgtgacgatcgcattacaaaggctgaatacaaagccgctaagaaagtcgacttaaccaaagaattccaaccaaaagccgatccagccgaaacaacgaagagttatggctatgtttataacttacttgaaacacaagcaactgatattatggccaaacagttagccaaagaagccaatgtttcaactgccaaacttaacaaagatccaaatctctacaaacaatatgaaacacaagcaactgaattactcagcactaaaggctatcaaattcacagtactatcgatcaagaaatttacgatgccatgcaaggggttgttcaccaacagggcgcaacattcggacggacttataccgataccgttactgacgaagaaacggggttacaaaagaccgtttcgtcccctgttcaaaacgggagcgtcttgttagataaccgcactaggaaagtgatttcttttgtcggcggacgtgatttctcactcaaacaaacaaactacatgttgaccaaacgttctcctggttcaactatcaagccattgttagtctatggtccagcaatcgatcagaaactgattggttctaaaacgatgttggccgatttcaagaccaacttcaaggattacgcaccaaccgattacggtggcacgatccagaacaaattcattccagctgacgaagcgttagcccagtcattgaatattccaaccgttaacctttataacgctttgaagaacacaacagatccttctaagtacatgagtaagatgggcatcaacctcaccgctgatgaatacagtcaactggggatttcacttggtgggaccagtgatggggtcagcgtcttagaacaggccagtgcattttcaaccttcgcggatcaaggtgaacataccgacgcctacgtgattgaaaagattacggatcccgccggtaatgtcgtttaccaacatcacgctaagaagaaacgcgtcttttcaaaagcaacgtcgtacatcatgaaccaaatgttagccggcgttttaacagatgggactgctacttcaatttacgatcaactctactttaataccaacaacttagttgggaaaaccgggacttcaaatgataaccgcgatatctggtttatcgggagtacccctgggatcaccctcgcttcatggatgggttatgacagtactggtcgtaacttaactgacaactcaagccagattaatgaaagatactggtcaaaattggccaacagcgtttatcagatcaacccaagcctcatgcgtttggaagatgatcatgaaaagccaagtacggtcacaagcagcaaagtcttgaaattaactggtcaattacctggcacggtttcaatcaacggcagctcacagaacttgaacggttcaaccgtcacctcgctttataacaactggacgccaaaagcaactagctatgaattcgggattggcggttctgcccggaactacgaaactttctggaaccactatttaggttataacaacggctatggttcaattacctatagcaccgctgatgaattaaatccaactagtggctacagtagtcgtcgcagtggcaccgcagcaacaacgacaaataattacacagcaaacacaactggtactgctgctacgactggcactacaaccggtacgaattatacagcgaataccaatccaacagatacagagacaacgaactaaactaaaaaaggcctcagttctaacgatttaaaatcgtttggaactgaggccttttttgattggtggaaacgtgctcttgtttgcaacaacttccgcttaatctaaaaatcccgttaatcctaaaacctggattaacgggatttttttattaatgctcaattgctgaccgcaaccaatagcactctattttgttgattctcttgctacgatactgtatggcaataggattgtcttgtcgtttacgtcttctttgttcatcatctttgttaaaagccgcattgctacggcacccatatcatacaatggttgtgagattgacgtcatcttaggacgtaccatttcagttaacttcgtgttgttacttgtcacaacttcgaattcagctgggatttgaacgccggcatcaactgccccgttcaagacaccaactgccaattcgtcatcactgacaacagcagctgttgccccagttgctttgattttgctgaacaatgcttcaccagcactgtagctgtattctgtttcaaaaattaaactttcgtcataagcaatgcctgcttcattcaaggcatccttgtaaccgcataaacgatacttgctgttaattgggaatttcaagctaccacaaacgaacgccactttgtcatgaccatttttgattaacttcaaagttgcatctttaacagcggcaacgtaatcgatgttaacactacccacttgttcgtctggatcaattgaaccagctaacacgattggtgtctttgaacgtgagaattcagcgcggatttcgtctgaaatactgtggcccatgtagattaaaccgtcaacttgttttgccaataaggtattcaacacttgaacttccttttggttgttttcatctgagttagccaaaataatgttgtacttgtacattgtcgcaacatcgtcaatcccacgagcaagtgatgcaaaatagatgtcactaacgtcgggaatgatgaccccaaccgttgttgtcttcttgcttgctaatccacgggccaccgcatttggacggtagtcaagacggttaataacttcaagaaccttcttacgtgttgcgggtttcacattcgggttaccattgacaactcgtgagacagttgccattgaaacgtcggcttcgcgcgcaacgtcataaattgtaattgtttgtttttccatgattaaatgattcctttcatttgtaaaataaaatagattatattttcagcagttttcattttacttcttgattaatttaacagagatttaaagcaaatgcaagcggtttacactaattttcatgaaatttacatttttgttttcatttgtggtttacattaccgtttacattggttgtgatatactagtgatatcaattgtaaaggaagtgctttagatgaataatcaattagcccaattacaaaattggcttggtgagaataatatggatgtggcttacatcagtaatccaaccaacatcctctatttcactggtttcgaaagtgatcctgcagaacgggtcttagccctctttgtttttgcagatcaggacccattcctatttacaccacaattagaagttgaatctgctaaaaaagctggctggaaactcgacgtttacggctatctcgatcacgaagatccatacgcaatcatcgcagatcaaatcaagaaacggaatgcgaaccctacacgttgggcacttgaaaaagacgaccttcctgttcaacgttacgaagccattctaaagcaattcccagacgcaacattcccaggcgacgcttcacgtttcatggaaaacttaaaattaattaaaacacctgaagaaatcgctttaatggaagcagccggccgtgaagccgattatgctttcgaagttggtttcaatgccttaaaagcaggtaaaacagaacaagatatcgttgcagaaatcgaatacgcattaatgcgcaaaggcgttatgcatatgagttttgataccatcgtacaatcaggtatcaacgcagctaacccccatggtggccccgaagccaacattttaaccccagatgccctcgtgctctttgaccttgggacattgcataagggttacatgagtgatgcgacgcggaccgttgcttttggcaaacctgatgcgaaatcactcgaaatccacaaagtctgtcttgaagcaaacttaactgcccaagcagcaatcaaacccggtatcacagcggctgaattagataagattgcacgtgacgtcatcactaaagcgggctacggcgaatacttcatccaccgtctaggtcacggcattggaacttcagaacacgaattcccatcaatcatggaaggcaacgacatgattatcaagccaggcatgtgtttctcaatcgaaccaggaatctacatcccaggcgttgccggtgttcgaattgaagactgtgtccacgtaacagaaacaggatcagaagccttcacacacatgacaaaagaactacaaacattctaagagtgctgattcaaacgggttggctttgaggattaacttaaaaacgcggattatgacgcttttcgtcatgattcgcgttttttggttaaccggaaaaggcagtttgaaacagcacgtttcaataagagtgcccttaattgcggtcagcaactgagcactaattaaaaaaggcagacgaaatcacaaaatgatttcgcctgccttttgttttaaagaactttataatccctagtcgttaaccattcaaactatgttacagtaatcctaacagtaagtttatgacggtggctaacgctcagaaatgaggtgatgcctatgttgattaagcgttaccttgagaaaggataacatgtcggttttcaacgcactgatgttggcaatttcggttgccatgttagtcattgagattctgaaatttaatcaaaaaaaataaccgtctaaactttgacgagtcacggttattttttaccaaaaacttgccaccgtcttaagcggactgtggagaagagtcgtgttgtcgcacggctctttttctatgctttcattataacaccgacttttaaaatttgcactagtcgtcaattcaaacaagcaaaaaagcccccgctaaatcaggcttggcgggggctttttcattgattatttatcttcagtgacttcttcttgaacagtttcaacagcggcggctgcttcgtctttggcttggccaaatgcactcttgccgtcgatcacgatatcgtcgaaatcttcttggctagcttcaaggctgccgccaaattgtgatttcaagtctgctgttttttcatcaaattgtgcttttgcttgttctttgatatcagacgcattgtcttgccaatcacttgcataatcatggacgcgattcatgtgtagctttgcgtcgtcttttaagtctgctgctgtttcacttgctaaatagtagtagtcttgtgcgcgatccattaaatcatcacctaagtccactaattttgattgtaattccttacccgtcttaggagttaacattaatgttgcaccaatggctgctgcgccaccgactaatacacctaatagaaaatgtcctttttttgccatgagaattactccttatcctttgtttgacgtcgattttggtaaaatcttaatgcacttgcgccaaccttcgaagcgaccgttgccttagcggttgtccgcccaacgttggtaacatgttccgttaaattgcgacttgccgtattcaaacttgaaacgctctcgccaagttcgccagccgctctgaaaacaggatccaagtcagcgactttcccgttcacatcgtctagcaatacgttggctttgctgagtaaaccttctacttctttagataaaatatcaacattctcagtaacaaccgtgacactcttgttggcttccgttactgtcttagaaacatccgttaatacttttgtgacttttaatagcatcactattagaaaaacaactaggaccgcaaaagcccctgcggcgattagcgccgcaatttgaccacccgtcattgatttgttcctcctacttcgttatctattacattgtctcttaaagactagaatagcattatttcccttaaccttcaattatcttcactatattaggtgccattttttctgacatttgctaaactaaagacatgctacaaaaaaggagtttcacgcatgttcacacgtttattagcggccgcaccaactccggtcgaatctgttcagaaacagaccaatatttttatgcgctacatcacttcaattgactgggataaattactcagcaccctcgttgctggattgtttcaaattatcctactctccgctttattctacctcatcaatcgcttaggtaaatacatcattaagcgcagcttcagaaaataccgcaaaactgatggtttctcaagtaaccgcatgaacaccatttatactttgatggtcaacgctttttcatacctcgtgattttcttctatctctatgcgctactcagcgttctcggcgttcctgttggtaccttgattgccggcgctgggatcttcagtttagccattgggttaggcgcacaaggtttcgtcaacgacatcgttaccggttttttcatcctcgcagaacaacaattcgatgtgggtgatatggttaaaattggtacggtagaaggcaccgtcaacgcgattggcttacgaaccacacaagttcaaagttacgatggcaccttaaatttcattcctaaccgcaatatctcgatcgtcagcaacctatcccgcaatgatatgcgtgttctgattaacattcgcatcttacccgacaccgacttacaactgttagcggcaaccgtcaatgaagtcaatgtgcaactggtgcccaaacatcctgaaatacaagatggccctacgattctcggggtaaccaccctcgcagatggtgtccttgcttaccagattgttatgcacaccactaacggcgaacaagctgccactaaccgtactttcttacaggcttacttgcaagccttgaatgaagctggtgtcccattaccttcaacacccgttacaattcccaccaaataaaagtcccctcatataaaaaggagaaccgcttatgccacttattaacgcactcaaaggcgccctaatcggcgtcgcactcgtaatacctggtctatccggcagcattttcgccgttatcgttggtctatacgaaccgcttctggcggctatcgcgcaattcaaaaaagattggcgccaagcaattggctttttatggccaatcgggattggcgctgggatcggcgtcttactctccaccaaaatcattctttggttatgcaccgcttatccactagcggcatacagtttcttcatcggtcttgtcgtcggcagtctcccattcatctggcgtagactcgccggactcaactggcaaaaagtgttaatcgccatcgtctgtggcgcaattatgctactactcacccagattggtggtcaccaatctgaatccgacatcgctatcaaacaactcactaccctccaagactttggcacgttactatttgccggcttcttctcagtatcactcatgctcatcccaggcgtctctgggtcaatcatgctcatgattgtgaagcaatatggcactgtttatcacgctgtcagtcaactactcgacttaatggtctacctcgtcacaggacgcttgacacaagccacagaagcgttcaaaagcgtcgcgctcctcttaccgttcatcattggggccgtcatcggaactgtgattgttgctaaattaatgcactacctattagcacacttcgtcgaatacgtttacgccggtgtgctcggcgttgtcattgccgccatctggattcttgcccaaaccggcgtcgcaccagcctggccagccctaacaaccgccacagcactactaggacccatcgcactcatcatcgctatgatcatcctaggcacaatcgcaacaatctacttcgacaaagcatagagtgctgttaaagcgatttgcctctgagcattaattaaaaatgagcctcaatctcgtcttttgagattaaggctcattttagattaagcggaaggtgttgcaattaaaaagcacgtttccacaaaaaaactatccacacccttcccaatcaagttgtggatagtttttatttattatagtgctttaatcgctctaagatgttcaatggattgaagtcaatatttgagacagattttaagagacattcagaaccgcgtttaccttccacagctcaaataaatcattaatcacgataataacttatttgaaccctggaaagcattaaatcaggcggccatttggctcgtaagtgtatttcaacttgtaagggggtctggtagcccagtgaactatgaattctcttcctattgtagaaagtaataagcattggggggttgctaaaaatgacattaactatgtgtcaccgaagcaacttattgatcaaatttgtaattccagaaaagtcggtgctaatttattaattaataccgggcttgaatttgacggtgccattccagcattttcacagtcgttattgaagattgtcggacaatggatgtcagtttatggagaagcaatttatgcgacaaatcattatgaaaatcagacctacttggcaagtggcgagacaaccgattttatcaaaggaaactatctgtttgtctatggtttaggtaatataggtaatagtaatgttgtgctgggtggcgaaaaggcgcggaagatagtgtttaatcaatatccgcaacgcgtaactagcatcacttggttagataatcaagcgttgtttgagtttgagcaggctttagacgggacgctaacaatttatgccaatgcttttcaatatgggacacatttaattgatcgcgtagccactataactgtcgaagactagtgacgaggtagaagatgaaaacaaaagatgtaacgattaggtatcaaaaaacagcgacggttcatagtaatcgcaatcaactggcttggcttggaaagatagcagttgggacatgtttcttgatgtacgtgtcatatatccaacaaattatggctaatttagctgggcaccctgtgtcggcgattcaaccaagcgttgcgatggttaatgcgactttgtggtttagttacggttggtttaaaccacataaagattggccaatcatcatttcaaatgtcccaggaatcatatttgggctggtaacattaattacaatttattaccattaatagcaaaataacccgggtcaattgacccggggtatttttttgatcaacttacgctaaattaattgacaccctttatgaatggtatggtaccataggcgtaattagaaaagcgaagggattcgggcgcatgcgacgttctaaatggataataatcatcattggtttaggagttttaattggcagtggatggtggcttttagggaatgcaacgacgcaaaaagcgcagcaagtcaagcaaacagaaaatgaacagcccactttttatttgcatggttatggcggttcggctcgttcgactgatagcatgatcaaagctgctcgcgaacaaaagaatgcgacacaggtcctcactgcaaccgttcgtaaggatggttcagttgatttacaggggcgttggttagctaaaacgacacgaccaatcgtgcaagttgttttcgaagataatcgcaatcctaactatcaacaagatggtgagtggtttaaaaacgtcttagtcgcggttaatcggcagcacagcttcaaacgattcaacgtggtggctcattcgatgggcaacttgacggccgtttattatttattgaaccatgcgattgataaacagttaccccgtatggcgaagatggtgaatattgcgggtcattttgatgggattatcgggatggatgatcagcctaatcaaaaccaggttaaaaaggatggccaaccacaaaaaatgaacgcgacttatcggcaactgatgggactgcgtaaccagctccctgctaaatcgattacggtgttgaatatctatggggatttaggcgatgggacgcattctgacggacgtgttagtaatgcatcgtcacagtcgttgcggtatttggtgacgcctggtgcgaagacctatcaagaaaagaagtttactggtaaaaaagcgcagcatagtcaattacacgaaaatcatgcagtcaatcaaactgtcttagcgtttttatggtaaaacatacttaaaaagtggtggcgacaaaaattaattttgtcgccaccacttttttaatgttcaagacggtagtctcgcgctgcttgttcgagattcgaaatgagagcttgttgttttggtgagaagaactgggtcttacgataggctaacgagatataaaagattggttgtggttcatccaataaatcaagtaccactaagtcatcagcaggcgtaatactggtttcagttagaaaaccgatgccgacattttcgtgaatcatactttttaagacactaacgtcattggtgcggtaaataatttcgggtttgatttgattgacgtccgataagttcttgaagaccacgggatgcacgaatccttccgcgagcataataaatttctcgtgggctaaatcacgaaaggcgaccgctggtttctgggctaagggactatcaggtgcaactacaatcttaaaatggtgacgttcgatgactttagctgtgatggtatcggtttgaagtggcgtcgcagagccaagaagcgcgacatctagttcaccggcttctaatgaagccaacaattctttggaacccccatcagctgtcttaaaatgttgaatcgtgccgttagcggctagcttttgtgctaattttgagaagtagtaagtgccgataattggtggcaagccaaaacgcaaatcagtagcgttgagattgagcatgtcggcctttgttagttcaatctccgctaatattcgcgcggcatgttgataaagttgctcaccactaggggtaataatcaatgattggtgtgattgatcgcgctgaatgagtttggtcgcgaattcatcttcaaggcgtttgaccgcgtaagtgatcgtcggttgactgaccttgaattgatcagcgactgccgtaaaattttttaatttaattagcgcagcaaaataggccaaatctttaatcttcataaaaactcctgtttaatgcagtttagacgtttcatataaatctattttatcataaatgtaagttttgactatcaaatgttgaggcgtgtatagtgaccaacatgatataaaagaaaaggagatttttaatatgaaagcacaacaaattttaaatgatccatttttaaataagggtacagcattcactgctgaagaacgtgcacaatttggtttaacggggatgttaccacctcacgtgcaaaccattgatgaacaagttaaacaagcttatgcccaatatcaatcaaaagccaacatgcttgaacaacggattttcttaatgtcaatttttaatgaaaaccgtgtgttgttctttaaattattcagccaacatgttgctgaattcatgccagtggtttacgatccaacgatcgctgacacaatcgaaaactacagtgctttatatgtgaacccccaaaacgctgctttcttatcaatcgacgatcctgattcaatgaagacaaccttggcaaacgctgctgatggtcgcgaaattaaattaatcgttgtgactgatggcgaaggaatcttagggattggcgactggggcacacaaggtgtggatatctcagttggtaaattaatggtttatacggctgctgccgggattgatcctagtcaagtcttaccagttgttttagatgctgggacgaaccgtgaaagcttactcaatgatgagttatacttaggcaaccgtcatgaacgggttcgcggcgatcgttactacgatttcgtcgatcaattcgtgcaaacagctgaagacctattccctaatatgtatcttcactttgaagattttggccggagcaatgctgctaatattttgaacaagtacaaagatcaaatcgtgacgttcaatgatgatatccaaggcacagggattatcacattagctgggattatgggcgctttaaatatctctggtggcaagatgaccgaccaagtttacatgagctttggtgctgggactgcgggtgctgggattacccatcgcatcttcgaagaaatgttacaagaaggtttaactgaagaacaagcacgtagccgtttctacatggttgacaagcaagggctattgtttgatgatgatccagaattaacaccagaacaaaaaccatttgcgcgcaaaaggagtgaattcgcgaatgctgatgaattaacaactttagaagctgctgtcaaagcaatccacccaaccattttagtggggacttcaacccaacctgggacctttacagaatcaatcgtgaaggaaatggctgctcacacagaacgcccaattattttcccattgtcaaacccaacgaaattagctgaagcagctgctgcagacttaatcaagtggactgacggcaaagctttagtagcgactgggattcctgctgcacctgttgaatacaacggtgtcacatatgaaatcggtcaagcaaacaacgctttagtctatccagggcttggtttaggcacaatcgcttccactgcgaaagtcttaaatgacgaaatgattagcaaagcagctcactcattgggtggcattgttgatccaacagaacctggcgcagctgtcttgcctcctgtgacaaaactagatatcttctcacaaacggttgcgaacgctgttgctcaaagcgctgttgatcaaggtttgaataaagaaccaattgctgacgtgcaaaaagccgtcgcagacatgaaatgggaaccagaatacaaagcactataatttaaatataaatcggtaggagcgtgaaagagttggcagcatttctaacatcattatcaagcgttgtcgaaatcgtcttagtcattgcattggggttttggctacggagttcaaaaaaattcgatgataattttaaaggcacaatttcatttttaatcatgaatgtcgctttaccattatcaattttcgtctcagtattagataacttaacccgtgaaaagttggtcggtttatctggcggcttgatctacgtcttaattagtttcgccctcggttatctcgtggcatggttactaaccaaggctttccggattcggccaggtcgtcgagggacatttatcaatatgttcgtcaatgctaataccatcttcattgggttaccattgaacttggcactattcggtgacaagagtttaccttacttcttgatctactatgtggccaatacggtttcaacatgggcaatcggggtcttcttcatctcaaatgatgatccaaccaaagaaaaaggcgctgctaaaggcaaatttaactggcgtaaattattaccttcaccattaatcggtttcttagccgcattaatttatcttttaactggtttaccattaccagaacttgttgataagacattctcaatggtcggtggcatcgtaacaccaatgtcattgatctacattgggattatcttagctgatgctggtttgaaatcaatccatttcgaccgcgatacagtccttgcgttattaggccgtttcgttgtggcaccagccatcatgattgccatcatgctattcttcaagaacacaacttcaattccatcaatcgaacaaagcacattgattattcaagctgcaacacctggtttggctgtcttaccaatcttagttggtcaatcacatggtgacgttaaatatgcaacgaacgttgtcacaacaagtaccgtcttattcgtggtcgttgtcccaatcttgatgcaaattgttcaatatatctaaagcttaaatgtgtcgttcagctgacactcccctaaatcttacccccagcgcgccgtctcaattaattgagacggcgctttttttgtgcaaagaaacacaaagaatgttgtcaaaggcggcaaagtgcattacaatgaaaacggatttaataatgtgaaggggacgatagcatgacagagaaaatctacactaacttagcacctgaaccattgggaccatacagccaagcgattgcaacggatcaactggtctttatgtcagggcaactcggattaaaagatggccaattggcaccggacttagcgagtcaaacaaaacaagcaatcacgaatatgcaacacgtgttagcggcagcaggattatccctagaaaacgttgtgaaaaccaattgttttttaactgatttggatgactttaacgaattcaatgaagtatatgcgcgattcttcggtgatatcgcaccggctagaagtgccgttcaagttggtaaactaccagctggcgcaattgttgagatagaagcagttgcaattcgttaatgccgtaattgactgaataaacaaccatttgaaaaaagcctccagaggaaattaaatgcatttcatttaatcatctctgggggcttttttgcatgcctgaaatttaatgtttaaagggatgttcatgggtacaaatactgatatataggcattgttgtgaaaatattctaccaatgttaattataaaaagattaaaattagatgatgaaaattgcggataaaatgaagctccagcgcgaccattttgatgacatggaaccgaatacaaatatcggcattaaagaagtttacacatgttgcataatcatagatagggattatctctttaaaagatttaacagattcgttttaaaacaacttgtacacaatttaatagcttatcagaatgaaaaaacattaagtccaattggtgattaattgattgaatctttgatatcccaattgataactagaccgtaccaaaggtgtagtgatgaatggaaaaatagaaaaatcatatggaggtagacgatggatagaagaaaattagcgctgggtgcaacaatgctgaccatgttattgacgtttatctgtatcaatagtggtcgtactcaagcagcgatacccgcccatattccaatcgatggcatctttaaaccctccattggggtagatagttccgttcaagcaggtggaattgtgcaagtgacaccagatagccagaacaagaagggggcaatttggtcggaagagcagtataagattgatttgacacataattttacaagtttaatgtatgtcaatttaggggacaaaaaagcgcaatcggttgacgggatggcctttgcaatgatgaatgacccagacaaggttaagaattggcagcaagtgaccggtggcgcccttggtgtttggcggaatccattttcttgggtaaaagataactcagcaatcgccaagtcatttgccgttgaattcgatacgtaccataatggcaatgattttgacggtttgctacccaatgatggcccagatagaggccatgttgcttataattttccaggacaagatagtgcatatcagcgtttaccaagtcgcttgtacgcgctaaaccatctacaacttcaaaaaccgcaaaatggtgattatttatcattagtaacattaggccatatcgtgatggcaccaagtgtacaggctgcgacaacatcgaatgaaacaactacgaggaaaattgcactagaagcagggggacacaacaacgactaacccaccaattgtgccagggacagatggaaacggaaacggaccaactggcgcaacaggggatatcacgattgataatttaacaccacttgattttggtaaggtgaaactgactggtggcgcgcaaaacgttaagaatatcgttaaagatcctaacgtacaagtcaccgataaacggggaactggcgctggctagaatattaccgttaaaagttcagaatttaaagacacaacggattcaacgcatatcttaaaaggcgcacagattaattttccagtcggtaaagtagtcgctagtgattcaacgaatactgctgcaccaacagccaaagcgattactgttcctgctgatgggttggataatgcgcaaatcttgatgagtgctgataaagataaagggatgggaacatgggcagatgtgatgacaactgacggcattacactggatatcgctggtggcgcttatgctggcagctataatgctgatttgacctggacacttggggatacaccgcttcaattagctggcagcagccgctaaatttgaaagaggcaagtgttaagtcgttactgcaacggactaaattttaatcgatgtgcaaagtgattaaagagagggacttcaaaaatgaaatggatgcatattttacaaagaatcagcgtcgtcatcttaatgggcggcatcgcgttgtggttgaatacaacgaccgtccaagcggctgatcagagtatgaattaccaagttaaagcgaatttacccagcagtcaaaacaatcaaagtgtaacgtattttgatttaaggctggcacctaatcaggaagagacgattagtatcacggtgcaaaataaggataaccaagcgcatatctttaacatcagtccgaatacggcggtgactaatcaaaacggggtcgttgattatagccagtcaaagaaaaaagcggatgaaacggcgcctgctaatattgcctcactgattacgggggataaaaaagtaacggtgccggctcacagtagcaaggacgccatttttaaaattaaaatgcctgctaagaagttccattgtactttattaggtggttttaatattgttcgtgaagggcagcctaccgttaaaaagcaaaagaatcgcgtgacattgcgtaaccaattcgcttatgtaatcggtctgaaagtgaccgaaagtgatgccattattgcgccaaatctgaaactgaatcacatcaaagcggggatcgttaactatcggacagcaattacggctaatttacagaatacaaaggctgttatgatcagaggcttgaaagttgatgcggtggttaccaagttaggctctgatcaagtgcttcaccggacagtcaaatcagacattgcgatggcaccgaattcgaactttgagtacgccatcaactgggataatgaagcgctgaagccgggcaaataaatgcttaagctaaccgccactgataagtcgggcggttagtggtattttacgagtcggtttaatattacagagcaaaaagcccatcaagctaatgaccaagccgttgatttacaaaaaacaaccattaactggtggtatatcatgcggtggcatattcctggtgctcttagttgggtatattatttttctaaaacgacaagcgaaaaaagcctgattcaatgaagtcccaatcctgagcgcgtcatcgattagaatggattcgaaaataatcccttgataatgaatagatggaagtattatctctattcactaccaagggatttttatatgtgctgcgttattggttgttcggttaattaggtttaaaaaagagggaatggattttatatcacgttatttacgaatgatattcataaacagtggttttttgatgccatttaacgtataataaattaaaaacaaattagagatgaggcaagaatattgatttcgactgaaacgacactagctgggtaccactttgataactgtttcatgaacgcggcgggggtttattgttatgatgctgctgagttaaatcaagtgcaggcttcaatggcagggactttcgtgaccaagagtgccaccgttatgccccgctctggaaatccagaaccacgttatcaaccaacgcgtttaggcagtatcaattcaatgggcttgccgaatgaaggcctaccttattatttagactatgtgagtcaacagcaaaaggcagtgccagacaagacatactttcaatcgattacgggatttaatattgaagaagacgagcaactgttggcacagattagtgcttctgattttaaaggtgtggtggaattgaacttatcttgtccgaacgtaccggggaagccgcaaacgggctatgattttgaaatggtggaacgaattctaacgcgagtttttacggtttatcacggtccattaggcgttaaattaccgccgtactttgatatcgtgcattttgatcagatggcggcgattttgaatcaatttccattagcgtttgtcaattcggtgaatagcattggaaatggcttgaaaattgatgtggcaactgaacgggttgtgattaaacctaagcatggtttcggtggcatcggtggcgattatatcaaaccaaccgccttagcgaatgtccatgccttctatcagcgtttgaatccagccattcaaattattgggactggtgggattaaatctggtcaagatgcatttgaacatattttatgtggggctagcatggtccaagttgggacagcgcttcaaaaagaaggccccattatttttgaacgtttaacgcgcgaattacagacaagcatggctcaaaaaggttatactaaactgtctgactttagaggcaaattacaatatttagattagttgaaatgaggatttacaatgcagtatcgttatttattttttgacatggacaatactttattcgattttgatgcggatgaagatcaagctttggcccaattattcaaagatcaaggggttcaattgacctcaacaattaagacaacttatcagacctttaatcaaaacttgtggcggcagtatgaagaaggtacgttaacccgggaaatattattgaacacacgctttgcaaccttctttaaagaacagtttaatcaggaagttgatggaccaagattgtcccaaaattatttagacaacttggcattaggccatgatttaatgccacaagcagaagctctgttaaaggcgttaaaagcagctaacattaagctatatgtcacaaccaacggggttgccaacacgcaatatcggcggttacaagattcaggattaatcacatatttcgatgccgtttttgtttcggaagagttgggatatcaaaaaccagatccacggtatttccaaagtgtcttccaacaattagaggggatctcacaagcagaagctttgattgtcggtgattcacttacttcagatgtgcaaggtgggcagaacgtgggtgtcgccacagcgtggtataacccgaaccagctagcaaatcaaatgacagacatacagccaacacacgaaattgaacacttaatggacttattggcaatttaaaagccgatttgcggcattcaagaggagtagataaaacatgaaaaagcaacgatattttagaattagcctaggttggcgaatcttaattggaatcggcctagggttagtggttggtcggtttttctaccataatcaaaccgctatctcaatcttacaatcaattggaaccttgttcatcaatttaattaagatgattgtgttaccaattgttgtttcctgtttggtcgttgggattgccaagatgggtgatatcaaaaaacttggccgaattggtggtaagacgttattgtatttcgaagtgatgacgaccttcgcaattattctcggattagctgtcggcaatattgctaaaccaggagcgctgattgacattcatagtttggcacatggctcaattagtcagtacacagcagccgctaagaccgctggaaatcatggcttgggtgatatcatcatggatatcgtgccaacgaatttctttgcggccttggggtctggtgaaatgattccagtcatcttctttacggtcatgttcggtttagggttggcgacctttggtaaaaaggcaaccccgctcatcgatgcttttgaaatgatttcagaggttatgttcaagatgacaaactggattatgcagttagcaccaatcggggtgtttgcattaatcggggttacaattgcccaattcggatttgaagctttgaaaccattgctctatttcatcatcgtttgttacgcaacgatggcatttttcgtggttgttgtggctgggttggtcgcgcggatttggcacatcaatatctttgaaatcttgaaagttttcaaagaagaattggtgctagccttttcaacggcgagttcagaagcagcgttacccaaagtaatggaaaaagtgcaaaattacggtgttagtcaagggattgcttcttttgtcattccaacgggttattcatttaacttggacggttcggcaatctaccaatcgttagcggcgctgtttttggcgcaagcctatcacattcatttaagcctcacccaacaaattactctattggtggtcttgatgattacctctaaagggatggctggggtccctggtgcttcattcgttgtcttattagcaacaatcaccacaatcggcgttccggctgctggtgtcgccttcattgcggggattgatcggattgtggatatgggacgaactgccgttaacgtaatgggaaactcattagcagcagtcattattgccaagtcagagaacgaatttgatgaacaaaaatatcaacaatatatgagtggcaatgaacttaaataaagcaaagaccttaaatcaatcgatttaaggtcttttttgtataaaaaacgattttagcacaccgcaaacattagcggtatctaattataaaagcttaagtaatgcgacttttagcgcttttttgtcgattatctagatcaatttcgcagataatctaaaaatgattagacagattagaattttgtggtaaaattaattcagtaaagcgttttaaaaaataaaaacgtggaactgttaactcagtcaataatgtttaagccattatttttttatattaattgatagcgttttattgatgagtatgacaactatttttattaaggaggtttttgtgaatggttggaatcgttattgcaagtcacggggagtttgctaaaggaatcatgcaatctggctcaatgatttttggcgaacaagaaaaagtacaagctgttacttttatgccaaatgaaggaccagatgatttgaaagcgcatttagaagctgccgttgcaacgtttgatgcagatgatgacgtcttattcttagttgatctttggggaggttcaccatttaatcaagctaatgggttgttcgaagcacataaagataagtgggcaatcgttacaggattaaacttaccaatgttgattgaagcttacgcatctcgtttatctatgacatctgctcatgaaatcgcagcacatatcattgatgaagctaaagcaggggtacgggttaaacctgaagaactacaaccagaagaagcacctaaggcagaagccgcacaaacgacttcaaactcaggcacacctggtaagttcaaatatgtcttggcacgaattgattcacgtttattacatggtcaagttgcaacgacatggtcgaagacaactaacccaacacggattatcgttgtttcagataacgttgctaaagatgaattacggacaaacttaattaaacaagctgctcctagtggcatcaaagcacacgtcgtgccagttgatcaaatgattaaattggcaaaagatgaccaacactttggtaaggaacgtgctttgttattatttgaatcaccacaagatgcacttagagcagttgaaggtggcgttccattagaaacaattaacgttggttcaatggcgcactcaactggtaaagtgcaaccaaatactgttttggcttttgaccaagatgatattgatacctttgaaaaactaaaagctaagggcatcaagttcgatgttcgtaaagtgccaagtgactcaaacggtaacatggatagtatccttaaaaaagcacaagcagaactagacaaacaaaataacaaataacatcagaagaaattggaggattaataatcatggatttgaatttcattcaagtgattttggtcatttttatcgcatttctagctggtatggaaggtatcttagatcaattccatttccatcagccagttattgcttgtacactaatcggtcttgtaaccggtcaattactaccttgtcttatcttaggtgggacattacaaatgatcgccttaggttgggctaacattggggccgctgttgcacccgatgctgctttggcatcaatcgcatctgcaattattttaatacttggtggccaaggaaaagccggcgttacatcagctatcgctatcgctgttcctcttgccgtagccgggttattattaacaatcatcgtacggacattagcaactggtatcgtgcacatcatggatgctgctgctaaagaaggtaacttccgtaagatcgaaatgtggcaatatatcgctattatcatgcaaggtttacgaatcgctattcctgcaggcttaatcttagcaatcggtgctggccctgttaaagaaatgttgacagcaatgccaatctggttaacagacggtttagcaatcggtggtgggatggtcgttgccgttggttacgcaatggttatcaacatgatggcaactaaagaagtatggccattcttcgcaattggtttcgtacttgctactatctcacaattgacacttatcggccttggtgcaatcggtgtttcacttgccctattatacttagccctttcaaaacaaggcggctcaggtaatggcggcggttcaaatactggtgacccacttggcgatattatcgacaactactaagaaggaggctaacaattatggcagaacaattaaaattaacgcgtaaagatcgtatttctgtttggctacgttcaactttccttcaaggttcttggaactacgaacgtatgcaaaatggtggttgggcttactcattaatcccagcaattaagaaattatacaaaacaaaagaagaccgggcagctgctttagttcgtcacatggaattctttaatactcatccttatgttgcttcaccaatcatcggggtaactttggcacttgaagaagaacgtgctaatggtgcaccaattgatgatgttacaattcaaggggttaaagttgggatgatgggacctttggctggtatcggcgatcccgtattctggttcactgttaaaccaatcatcggtgctttggctgcttcacttgctatgagtggtaacattcttggcccaatcatttactttatcgcttggaatgctatccggatgtcattcatgtggtatacacaagaattcggctaccgtgctggttcaaagattacagaagatttatctggtggtattttgcaagacatcacaaagggtgcttcaatccttgggatgttcatcttaggttcgttggttaaccgttgggtatctgtcaagtttacgccagttgtttcatctgttaagttggacaaaggcgcattcatcgactgggataaattacctagcggtgctaagggtatccaatcagccttacaacaacaagctcaaggtttgtcattgacaagcaataaagtgacaacgttgcaagacaacttggatagtttaattcctgggttagctgcattaggattaacattattctgtatgtggttacttaagaagaaagtctcaccaatcgtgattattcttggcttattcgtagtcggaattgtcttccatctattacacttaatgtaaaagagtgcataagcaggcgcctatattttgaggattaactggatttgacgaattggcgatgcaatcgccgatttggcaaatttggttaaccgcaggaatatgcctactgaagcacgtttagaaaacaaaggaggggctaggacaaagtcaatttgtcctagcccctcctttttataaaagcgtataatgaaagtaagtttttggaaatggagtcgatattatggttcaatcgattaatacaaaggtggacttagtgattaaagccacgtcgtttacagcactctctgattatggacaaatcatgatcggggatagagggtttgaatttttcaatgatcgtgacgcacgacaatttattcaaattccatgggaagaagttgactatgtgattgcatcagtcatgttcaaaggcaagtggattccccgctatgctatccaaacaaagaaaaatgggacgtatacttttgcttcaaaggaacccaaaaaattgctccgcgccattcgcgagtatgtgcccgcagaacgcttagttcaatcactaggggtctgggatgtgattaagcgtgtgtttaaacgcaaatcaaattaacttcaggaaggtgtgaccaatattggtcacaccttttttgaatcgaattgcctgtgattttaattggtaccgatttgagtggcgtgctagaatatcatataaggttgattgttcaacattttaaaaaattaagttaaatgaggtaatgatcatgggatttgatgaagcgattaatgcaattaaggctggcaaaaaagtggtacggactggctgggatggtccagaattatttattttccaagtggccgatgggacattcgaggggcaagcaattagtccctacctattaattaaaacaaccgaaacaccagcatactcaatgttccaaccaacatcgtgtgatgtattggctgatgattggcaattggtcgactaatggggcattttgcagatttagcgactaaaaccattttaattaccggggcggcatcgggaattgggcgcgctcaagtggccgcttttttagcagagggggcattggtgttagcacttgatcgccagccgattgaagtccctgttgatagtcggtgcatcacagcgcaggttgatgtttgtgatgaaacgcaattaacaatgacattagcgactttgctggcagaatatggcccaatcgatgtggtctgcaacacggcaggtgtgttggatgcttatgcaccaacgcttgataccagtagtgcggattgggatcgaattatggcaacgaatttaaaaagtcaatatcttgtaacaaatgcgatcttgccaacaatggttgcgcaaaagcgtggggtattcgttaatatggcttcgattgctgggctagttgctggtggcggtggtgcgacttatacggcatcgaaacacgccatcattggctatacaaaacagcttgattatgattacgccgctaaggggattcgcgccaactgtatcgccccaggtgcgattgagacgccgatgaacgtagccgattttgcggggactggtgagatggcacaagaagttgcccgtcagacaccagcggggcgttgggcacaaccaactgaagttgcgagcttaagtgtttacttggcgagtgaggttgcggattacattcatggcaccgtcgttccaattgatggtggctggattgaaaaataacgctgactaaggagattatgatggcaaaacaaattaaattaagtcaaaccgtttatgaattggtaacggcctatcctgaagtggtgtcggtgcttgttgaaattgggcttgatggggtcacgaacccagcgcttttgaatactgcggggcgttttatgacattgcctaaaggagctaagatgaagcaaattcctttgacgacgattatcgctagtctagaagcacaaggattcgaggtgttagctgatgtgtgagcaacagcatagcagtgcgtaccgccaaaaacgaatcgtggaaatcttaaaaatgctgcatgaaggtggctcgtttgaagaggctaagcggatttttgatgagtccttttctggggttgacgtgtctgaaattacgtctgctgaacgggaattgattgccagtggcttgaacccgatggagattcaacatttgtgtaatgtccatgctgcggttttcaagggggcgattaattcaaatggggctgaaacgccggaacaagaacagccaggacacccagtcgctgtgatgaaattagaaaatttggtcatgaactcgctcttaaatgatgaattactgccatgtttgaagaaatggcagcagtcagggactgaccaaaattatctcgtgcggatgcaacaagcgttaaaagatttacagttgatcgaccgccactatttacggaaagaaaacttaatttttccgttgatggatcaatatgggattactgcaccacccaaagtgatgtggggggtggatgatcaaattcgggggttggtgaagacggcctatcaaatggtaactgcggaaccaattccggataaatatgcaattgaagcagccgttgaaaagatgagcaaagaaattcaagaaatgattttcaaagaagaagaaatcatgattccgatggttaatgaagtctttacaccagctgactggggactaattgcttctgaaagccaaccaatcgggtataccttaattccagacccattaccatggcaaccaagtgctgaagctatcgcggcggccgaaaagcggaccgtgccgaagattgcgcaagaactgaatgcgatggcgcaatcgttggcggatgcgcaaatgatgacccaaacaacgccaccagaaccgggcccctcttcgatagcagcagcgactaatattccgtttgaaattcaggggcaagtggcacccaaaaccgtcgctaaaaaggctgcggttaaaccagaaatgccagattttgtgaaggcaatgttagctgacgaaaaagaagcggcaccaaaagcgaaggttcaagcacgtcgggaagcaccacaaccccatatcgaaattggcgtggataaccaagctaaaatcgttctaccatctgggtcgatgaatatcagcgaattgacggcgattctccaagtactaccgcttgatttaacctttgtcgatcaaaacgatattgtgcggtggttctcagagaacgagcatcgtatttttccaagaacacgggcagtgattggccgagcagttgtgaactgccatccaccaaagagtgtggataaggttgagaacattttagcggactttcatgcagggcgagaagaccacgctgatttttggttgaacttccgcgggatgttcgtctatattcgctattttgcggttcgtgatccacagggacaatacttaggctgtttagaagtcagtcaggatttaacggaactccgtgcactaacaggcgaaaaacggttataaaaatgcattaagaggagaaaagagatgcaacaaattattttattacttgccgtcggtgttttagccggcgtgttgggttcaatcttagggattggtggcgggatcattgtaacccccgtattaacgctagcgattggcctagatattaaatacgcgattggggccagcattattgccgtgattgcaacaagttctggtgcaactatcgcctatttgaaagatgatatgctcaacttacgagtggcgatgttcctagaaattgcaacgaccgtcggggcgattatcggggcgttattgaccggcatcgtaccaactggattcttattcatcttattcggcgcattcttgctattttcaacgtacaacatgattcaaaaattacgtggtaaagttgcagaacaacacgtcggcgctggtgaagataagtgggccaagaagttgaacttaaatggcacttactacgataaggccaaccaagaacaagtcgactacgctgttgaacaagtaccaggcggctttgccatgatgttcggggccggcattgcttctggcttgctcggtatcgggagtggggtattcaaagtgaccgccatggatacgattatgaagatgccattgaaaccatcaagtgccacgagtaatttgatgatgggggttacggcagcagcttcggccactgtttatttcttcagcggtgcgattattcccagcgttgctgcaccgttagcaatcggaattttggtaggttccactgtgggttcacggattatgcagtatttgcaaccacgtgtgattcgcatgatttttatccccattttgttatacacaggtttacaaatggtgcttaaaggattcggggtgcatatttaatgacagataaaaaagcagagatggctcaaattgaactcgtcatcggtaaaattttacgcattggggtggcggtttcagcaacgctgctcattattggcatgttacttgcgattattcatggcggtacaggttattcagaatatcaatttccaacgacctttaccgaaattttcagtggcattgctgcatttaaggctggcgctgtgattatgttgggcttattctgcctcattttaacgccagtcttgcgtgtggtggtatcaatctacgcatttgctaaagaaggggattacctctacgtttggattacggttattgtgttggtcatcttaatcatcgggatggcaattggttttataaagaaataaagagtggtttattagctcagtatctcgcgaggattaaaaaaagggccaacgacaaacatgtttgtcgttggcccttttttttgtggtgaattaggctaatccgcagaagataaccgggcttactgcgcactctgatttaaaacgtgctccgacagacatccgcttccggttagctacgtcccgcaaacaatcgacgtcgtcgcttattcacgagattaggctaatcctcagcgtataatcgtctgccgtcgcactctactttgaaacgtgctccgtaagccatcttcttccggttagcgacatcagtcaaatcaccgactttgtcggcaatccgcctgattaagctaatcctcagaagataaacgggcttactgcgcactctattccattcctagtattcttttctttttttcttcgaattcttcgtgggtcattaggccatcgtcgcgcattttgaggtaggccataatgagatcaccagttttaacgtaactgaggtcttcttcttcaacggttggtttttcgaggaagtcagctaaggctgtgtataacttgcgcacagcaaggttatcggcgggttcaaaactgatgacaattttttcgagggcgtggttgggtttttggtagagaatttggagatgaccatgccgataagtcgcttcaaaaaagcggactgattttaatttgctaaacggaatgtcacgatcctggttttgtttcttcttaaacagtccgggatagtgaattgttaggatattttcgtcataggttaattcgagtttttgaggttttttaatgagataagtttgcatcgcttgctcctttaatcattcttaagtaaaagcacggtagttcttaataaatgaagcctaaacttacctttatcatagtagacagtgaccctaaatagcaagctgtttgtattggtttatgaaatgaggtgggatgatgaaattctttataggtattcgcaacggcctgttagtggcattaccgatttggtgtttaataatcttctcaattacgtattggttacgctaaaataaaaaaacgggcgccgcacaaaaactgtgcagtgcccgttttttaacgtaaattggctgttttttaggtctaaagacggtttttatgctagtatgaatagattacaattagtgacattgattgcatctaggcgatgtaattattataatgaaatcaaatgtccaaagataaggaggaggaaaccaattgaatattgggatatttacggacacctactttccacaagtcagtggtgtggcaacctccattaaaacattaaaagaagccctagaaaaacaagggcattcggtctacatatttacaacgaccgatccacatgttgacaaagatgcagtcgaaccgaatattttccggtttgctagtgtcccgtttgtctcatttacggatcggcgaattgctgtgcgcggcttatttcacgcttatcaagtggctaaggaattggatctcgatatcgtgcatacccagaccgaattttcgatgggctacatcgggaagtttgtcgctaaaaatttaaaaattccttgtttacatacgtatcatacgatgtacgaggattatttacactatgttttaaacgggaagttattacggccataccatgttaagcaaatgacaaaggcctttttatatcacatgtcaggcatcgtggcaccatcagagcgggtttctcaaaccttaaatggctatcaagtgaaggcccccatccggattattccgaccggggtcgatattagtcgctttgagcgcgaagtgacccgcgacatacgggccgaattgggcttgacgccagaacaacctgtgctcttatcattgagtcgcgttgcttatgaaaaacggattgatatcttagttgatgcgttacccaaactagtcgcccaaacaccagatttaatgttagtgattgttggtgaaggtccagctcgagaagatttagaagctcaggttgccaggttaaacatgaccgaccacgtgattttcactggaatggttgataacgatgaagttgcaaattattatcatatggcgaatctttttgtctccgccagtgactctgaatcacaaggattaacttatattgaagcgatggccgctgaactcaagattgtcgtcatgacaagtccatatgcggctgagttattaactgatccttcaattgggacgacatttacgaacgaagatgaaatgatccatcaagtatcgaattatttgaatcatccacatgcatttgatgatccagcaccgcgccgaaagaagttgcatgctatttcggcggattactttgcggaacagatgattcatttctataagcaatcacagctattatatgacgaattaaagttagaccaagatgatttattggaattagaagatttagatactaaaaaataagtcgcgttggcggaaaactgttgatcatttaatcaacagttttttcatatcgttgctaataacaagaaaaagggtcgtttatgagtagaacgaataagattgtttttgcagtcatgctgttgattgggtgtgggatttttgcctatgaaagtcgcacgctggcgttgaaacagctgtttatcgatattagtcatctgaaactttggtggctgttggtcgccttattatgtatgttaatttcgtggtttttcgaagcacttgtcttacgcgtctttctaaaagaccgcacagaacacttttctttatacaatgcgcttcggattccgttgattgcacaactattcaatgcgattacaccgttttcttcaggtggacaaccggcacaactggtagcgttgatgcaatcccgtgtagaagctgggcaagctagctcagtactgctgatgaagtttattgtttaccaattcatggtactggtgaatttcttattaagtatgatgattggtttctcgcaagtttccaagcattttgggacgctgtcgattttgattactttcggattaatcgtgcatgtggttgtgttagccgtattgttgctaatcatgtattacaatcgatttacgaaacagttagtgcactggttattaattccggtgggctggttcgtctcccaaaaacgggtgacggaatggcggaccatgttaatggccaaaatcgataccttttacgcggagagtctacaccttaaacgcgagaaaaagaaactaatcaagggctgtattttaacccttgggcaactttttttctattatagtgtgccatactttgtcttattggcacttggcatcccgcatgttaattatttagaggtgatggtcttacacatcatgattgtcatgattgtctcgctctttccagttccaggcggttctggtggggcagaatatagttttaagacgttatttgccacttttatcccgagttcaagtaaactggtgttaggcatgttgctctggcgattgtttacgtactatctcgggatgttcatggggattggggcgttagcagttaaaccacgagtaactgataaaaagtaggaggcgtttttgatgcaaccaacaattggcttcattggaacaggtgtcatgggtagtagcatggtcaagaatttattgaaggcagactatccagttgtcgtgtataaccggacaaaacaaaaagcggatgcagttgtggcactcggtgcaacatgggctgattcaccagcagcggttgtcgcgcaaagtcagattgtgttatcaatcgtcggttatccgcaagatgtcgaagccatctattatggtgaagacggaatttttagtgctgcacaacctggtcagattttggtggatatgacgaccagcacgccaacattggcgcagagaattgccaaaacagcagctgacaaaggtctgcaagcattagatgcgcctgtttctggtggcgatatcggcgcccaaaacgggacgttgacgattatggtcggtggcgatcaagctgcctatgaaacggcattacccgtttttgaagcaatgggtaagactgtccatcgcttcggtgctgccgggacaggccaacatacaaagatggccaatcaaatcatgattgctggcacaatgaccggaatgacagagatgttagtgtatgctaaagcagccggattagaactagaagcggttttaaacacggttaatggtgggagtgctcagaactggagccttgcaaactatggtccacgtattctagcgcaagactatacaccaggctttttcgcaaaacattttttaaaggatttaaagattgcattaacggaatccgaaaagatggggctccatttaccagctacgcttcaagctaagaaactctatgcgcagctcgttaatgataaacaattaggcgatgatggcacccaagctttaattaaattatggtggccttctgcaaaataattggatataaacggtgcagaagtgctctttttctgataaactgatagttagttattaaaggaggcttcgccatgcaatcatcacagttagttgcgattatcaaacgtctggtagcaatgcaagaagatcaaagcgctgaggttcaagaaagacgttttgaaaaggacggcgatttaaaagcaactgttagctatgatcctcaagctcaagcatttgaacttgaagacagcaacacacatcaacaattccaatttgacaatattgatttagttgcaatggaactatacgatttattagcagactagttaattaaccattgagtatcgaattacttgatggtttttttgctacttaagcaggtgatagtcttgctcagttgcgactcagattattaaaaatggtttaatatttggcattcaagccggttacatattgcttttcatttcacggatgtgtaaactaactttcagattgtcaacggcttttaaagcccaacgacctttaacggaggctactgtatcgatgaaacaaattggtcataaaattcaatcaggattaagcacacgatggggattcttccttttcgcagttgcgctattctggcttaaaacaatttacgcatatcaaacaaaatttaacttaggcgtcaaaggtggcatgcaggccttcttaatgacgattaatcccattccaacaaccttattgctatttgggattgccttgtttatgaatggccgaaagtcatacattacgttgattattattgatttaataacctcaacttggttattctcgaatattttgtattaccgtgaattttcagacttcttaacgtttaacttaatgaagggctctggtgcggtatcaaataacttgggcaagagtattgctgggattattgaatattctgatttcctagttttcgctgatgttttattgctaatcatcttattggctactaagttagtgaagattgatcaccatgtctttatgaagcggaatgcatttgcaattactgggttagctgttgtgttattcggtgccaacctcgggattgcagaagcagatcgttctgggttattaacccggacgttcgataacaactacatcgttaagtatcttgggatgaatgcatacactgtctatgatggcgtgaagacgaccaagaataatgcgattaaggctaatgctgatagtagtagtatgagcagtgtcttgaagtatatgaaggacaaccgggttgcacccaatgttgaatacactggcgtggctaagggtaagaacgtctttgttatccatttagagagtttccaacaatttttaattgattataagtgggacggtcaagaagtcacaccaaatatcaataagctatatcacgaccaaaacaccctcagtttcgacaatttctttaaccaagttggtcaaggtaagacggctgatgctgaattaatgctcgaaaactcattgttcgggttacctgaaggggccgccatggtcactcaagggacaaccaataccttccaagcagcaccatcaattctagatcaacaaggttacacaaccgcttcattccatggggatgtgccaagtttctggaatcgggataatacctacaagtcatggggctatgattacttcttcagttctcaatactttaaagaaggtaaaggctacaacgtgggttatggcttgaaagataagatcttcatgcaagactcagcccaatacattgaacaattaccacaaccgttctatgctaaattaatcaccgtgacaaatcactatccatacttattggataaacaaaatcaatcaattgctaagaccgatactggtgatgatacagttgatggttatgtgcaaaccgctaagtatttggatcaatcaattggtgaattcttagcttggttacaaaagactggcttagataagaatagtatgctcgttctatatggcgatcattatgggatttcagggaaccataagaaggctgttgcgaagttattgaatcaggataaatttactgattttgataatgcgcaattccaaaaagtaccgttcatggtgcatatggatgggttaaaaggtggcgttaaccatacctatggtggtgaaattgacgttttaccaaccttattgaacctattaggtgtaaaaaatgacgataccatccaatttggttcggatttacttgcgcctaaccgcaatcagacggttgtctttagaaatggggactttgtcacaccacagtatacgaaggtaggcagcacctattacgatacgactaatgggaagacgctgacgaatttaacggcagcgcagaagaagcaattaacggcaatcagtgaacatgtaacggaagaattgtcactttctgacaaggtaatcaccggcgatctacttcgattctatacaccacaaggattcgaaaaaccagataagtctaagattagctacaaggtgaaagatgctaaagctaagttgaaagacagtaacaataaaacgagtgttatccagcaaaataatggtaagtcaacaatggacctttatgaaacggatgcacctgaattgaagtaaagtatgtaaagacgttacgggactcgcgtaacgtctttttttgagcaaagatacttgtcagtctcgtcaaaaaaaggtacgattacagcaataaggatatatgataatgattatcattagcgaaaggtggtggcaaaatgagtcacatcgtgcaacaaacgttacggaaactcaaagaacacaacgtacggatcacgccacagcggcaagctgttttggaattcatgattggcactcatatgcatccgactgcagacgatgtctataaggcgctagcagggcgctttccgaatatgagtgttgcgacaatctataataacttgcgtctgtttacctcattagggattattgaagaaatggcttatggagatgcatccagtcattttgattttgcgcagaccaagcattatcacgctatttgtgagaactgtggaaaagtagttgatgttttttatccggagttagatgatgtagaagtgattgctgagaatctaacggggtttatggtaactgggcaccgaatggaagtgcatggtatctgtccagaatgccaagcaaagcttgcaaataactaagttgtttgaatatttaaaaaaaagatgaattttatgcaaattttacttgacgatagatttagatgttggtatagtattctatgttgtcagcgagagaaaagctcatcgctaacgaaataacgggtcaaacgagattgaataaatattcagaaaatatttataaaaatagtcaatataaaaacccccgatattggattttggtccaatatcgggggttcacttcaacggttcttttttagttatttgaaatagtcggttaagccggtataaacggcatcagcgactttagcttggtaattagcactgctaatataactaaagtctttatcagaattgatgtagccgagttctaagagaacagcaggccgttgattatcgcgaaggacttgataattgccgtattcaatgccgcgattgttaagcggtaatgtcttagtctgattgttgatggccttcgcgaggctcatatccttactgcttgaatagtagtaggttgttgtcccggatgcttcattggcttcattgcttgaatcaaaatgaacgctgataaaggcatcagcctttaatttattggcaagagcaggtcgcggttcgagatcgacaaaactatcatttgaacgcgttagcacgacgttagcaccagccgcttttaattttttagcaatcgcatcgacggtcgctaatgtgtagtctttttcatacttagacttagttgaaagtgcaccgacgtcggtgccaccatgaccagcatctaaaacaatggtggcttcagaaagggaagtagcgctagtcttaacaacttcattcttctcagaaggagtgacaacccaacttgcgacgtaaccggtattaccatcggcatctttaacttgataccaagtaccactcttattgatataagttagcttggtattggccgggtagctttgggtatattgatacgaaacatcaggaccagtgcgtagcttggtattatccagttgggtggtcactgatttaatcgcggagctacttgtatcagtatccgtagactcagattcagcggttgtcgttttttgaacagtcgccggagcttggtcggaaacttcgattaaatcactttgtacccaaccaactgctgagttgtatttaatctggctccaaccgttttgttggtataagactgtaatttcgtcaccttgatttaacttaccgagtagttgactatcggcactactgctttggcggacattggcaaaactgttggtgaccttagcgactcggtttgaagtggcactgacttcggtgttatcgactaaccagctagcaacccagccaatcttatcaccacttaagcgcacttggtaccaattattcttttgtgagataacattcattgtttcgcctttattggcttgactcatgacatcataagataatccagggccttggcgaacgtttacgacgttcgctttaatcgtaatttgttggtaagcagccagcgcgtgggtcacaaagagaccgacaaaaacgagtaatgctaatataataacggccggatagtgtttaaaccagctcaaaggtttctgcatttttttcaacacctttgttatgttttattaatttataaggttaattatagcaaaaaactcaactttctaaagagtttcagcgaaaaagttacaaaaaattcaagattgattgacttttttttgaaataacgttaatcttataacaataagaataagtgatgaccagtgataaagtaaaggctaagccccctacgacagagatgatttcacagctgcaagaaatcaatggcacgccgagactgcttttgaggtctgtgtggtcgcacaccgttggcaacaacgttatataattaagctaaaattaaggtggtaccgtgcatttaagcacccttgttcaacgacaggggtgtttttttatttggtatccatttggaggaatgatcatgggctatcaaaagccaaaaggaactgcggatattttacctggagattcaaaccagtggcaattagtggagaaaacggcacgcgacgtttttgcccgctatcaattcaacgaaattagaacaccattatttgaaagctatgatgtcttttcacggagttcaggcgatacatctgatattgtcagcaaagaaatgtatgatttcatggataaaggggatcggcatatcgcgctgcgtccagagggcacagctggagttgtacgggcgttcgtagaaaataaactttatgggccagaacatcaaaaaccttataaggtgtattacatgggaccaatgttccgttatgaacggccacaatcaggccggcaacgccagttccatcaaattggggtcgaagcatttggttctgagaatccagcggtcgatattgaagtcattagcatggcgatgcgtttattacgtgaatgccatattacggatttaaaactggccatcaataccttaggggatgcggaaagtcgcgcggcttatcatgaagcccttgtcagctatcttgaaccacattttgatgaattaagtgacgattctaaagttcgtctacacaagaacccattgcgcgtcttagatagtaaagatgctaaggaccaagaaattgtgaaggatgcacctgttattttggattacttaacaccagaagcaacggcgcactttgaaacggttaagcacttacttgaaacattgcacattccatatgaagtggatactgaaatggtgcgcggactcgattattacaatcacacaatttttgaaattatgacaaataataaggtgcttggtcgcggctacacaaccgtcttagccggtggccgttataatgggttagttgaacaacttggtggcccggacatgccaggggttggttttggcttaggcgttgaacgattattattattgatgaatgcgcaaaacgaagcgttggttccagaatctaaactcgatgtgtatgtcgttggaattggcgctgaaacaagtgcgacaactctccaaatcgttgaaaagattcgtgatacaggtttaaccgctgatcgagactatcttgatcgtaaaccaaaagcgcaatttaaaacagctaataagttaaacgcccaaatggtgattacaatcggtgaatcagaattagctgatcaaacagcacatgttaaagacatgattagtggtgttgaaattacggtaccacttgctgaagtctatgctgactttaaagcagtgcaacaacagttaaatcaaaattaacgcatataagatgcctcaagagtaaatttgaggcatcttttttatttgatggcagtcaattcactttaatcctcaggaaatcccagactgtcagaacactctgagcatatttgtcgctatctgtttgtatctgcttataataataaacacgaaggagtgatggatatgacagatgatttagaacaacggttaacgacggaacaatatgcggtaacccaacaaaatgcgacggaggccccatttaccggtgagtatgatgattttgatgaacaaggcatctacgtggatgttgtcagtcatgaaccattatttagttcgttagataaatatgatgcaggctgtggttggccctcatttacaaagccaattgcgcctttgacggaacgccgggaccaatcttatgggatggaacgcgttgaagtccgtagtgaagaagctaattcgcatttagggcacgtttttaatgatggaccgcaagaagctggtggattacgctattgcatcaactcagcagctttaaaatttattccagtcgaacaactcgaaaatgaaggttacggtcaatatctaagcttatttgaagagggggcacaataatggcaactgatacagcaatttttgccggtgggtgtttttggtgcatggttcatccgtttgatcagcaaccggggattatcaaggttgtttctggttataccggtgggcatgttcctaatccaacttatgaggaagtttgctcgcatacgacggggcacactgaagcagttgaaattacatttgatcccgcgattatttcttatgcggaattagttgaaatttattggcgccaaacagatccaaccgatgccatggggcagttccaagatcgtggcgatagttaccggccggtgattttcgttaactcgcctgagcaacgtgcaatcgcggaagcttccaaacaagcattaatcgatagtggtcgcttcaacgaaccgattgtcacgcaaattgaggctgccaaaccgttctatccagccgaagaatatcaccaagatttctataaaaaagaaccatttagagcagaattggtcgaggggacacgccgtgctttcattcgtgaaaattgggcgcattaattccaagaaatcctttagtattcacaaatggtatgctagaatgaaagacatcaaaagtggataggtgtgatattcaagtggacgatttagctcggaaacatcaaaatatggcgaagatttcggcagccattttatacggaatttgtgtgtcgattgcattgaactttttctgggaagaaggtggcatttacgcctctgggattaccgggttcgcgcaattcattcatacagtgacgtcgaaatttatgccgtttctaccatttccattatcaacgtcattgatgttattcgtgttaaatgtgccattatttattcttgcgtggttcaaaattggccaccatttcaccatttatacgtttattgcagttgttttttcaagtgttatggtacagattatgccctttacacagctaacggctaatccgattatctgtgcgatttttggggcggtaattaacggttttgggaccgggatggccttgaaaaacgatatttccactggtggcttagatatcattgggattgtactgcgcaaaaaaaccggccgttcagtcggttcaatcaatatcatgtttaatgtggcgctcgtttttgccgctgggttcctctttggttgggaacatgcgctctatagtatcttgagtatttttgtcaacggcaaagtcatcgatatggtttacacgcgccaacaaaaactgcaagtgatgattattaccgataagtccaaagttgtgattcaaatgattcaagacgaaatgcggcgtgggattacgattgtccacgacgtagaaggggcatataaccgtgaagaaaagacgatgttatttaccgttatttctcgctttgaaatgcatgatttagaaatggtcatgaaacaagcggatgaccacgcattcgtcagcatgacggaagctgtcaaaattctcgggcatttctatgaacctaagattaaataagataacccgccattcaattgaatggcgggctttttttatgggttaggtttcgtcttgctttttgttgcgctttctgtgacaatctaggtaatcaaaatgcatggaggtagtggaatgttattagggagtcacgttagtatgaagggcaagcagatgttactagggtcagcggagagtgcagttgattttggtgcaaatgccttcatgatatataccggcgcgccacaaaatacgcgccgcaaaccaatcgaagaattaaatattgaagcagcaaaaccctatattgaagctcacaacttaggtccaattgttgttcatgcaccatacatcgttaatttagggaatacagtgaagcctgagaacttcaagtttgcggtctcttttttacaagaagaagtgttacgcgctgaagcattaggggccactcaaatcgtcttgcatccaggtgcacacgttggggcgggtgcagatgctggtattcaacaaattatcaaaggattaaacgaaattttacgacctgatcaaaccgcccaaattgccttagaaaccatggcaggtaaaggaaccgaagtcgggcggtcatttgaagaacttgcacagatgatcgatggcgtgacttacaatgaaaagttatcagtgacgtttgatacttgtcatacaaatgatgccggatataatgtgcgtgaagattttgacggcgttttgaatgaattcgatcacattatcggtttggaccgcttaaaagttgttcatttaaacgattctaagaacccacaaggcgcacacaaagatcgtcatgccaatattggttttggtgaaatcggatttgatgcgctaaaccatgtcttacagcatgaacaactcgttaatgtgcctaaaattctagaaaccccatatgttggcgaagataagaagcataactttgcaccatatgcgtatgaaattgcgatgctcaaagcggggcaattcgaccctgatttattaacgaaggttgagcagaacgaaggcaaactatgaatttaaaacgaactaagtttggtatttttatcttaatagcggcgttttggacctttatttttagccagccagtccaggctgccgatacctatgacatcagtcgttatcaggtaaacgttgatgtacaacctgatgggagtgctcaggtcgaacaaaaaacggtgtttgatatccaagatgatatccatggggtctatatcaaccagaatctccaaacaaacgttggtcaaccaaagaagttggttaacccgcaagtcgcagttaatggtcatccgtttagtcaaagtgaatcaggtactgaaggcacctatagcttaactgatgcacaacaaaattatcggttcaaactataccaaactgcacaagatggcaatcaattagcggttactttgaaatatcagttacaaaatctgattattaattatcgtgatacggcggaattgaattggaaagtgattggcgatgcgtgggatagtgacttacaaaacgttcaagtggtaatacaattacctaccacattcaaaaaagcagacctcaaatcatggacgcacggcaatttagatgggcaacaagtcgttgaacccgataaaggccgggtaacaattaaactcgctaataatccagcaaaccaatttgtcgaaagccatattatttttccaacggcggtgactgcggcgaatccgaatcagattgatcaatcacgtcgggaagccattatcaaacaagaagcgcgtttggcgcaacaagctaatcaagaacgcaaagcacaaaaacgccgttattggcttttatctataggagcagtggtcttagcgcccggcatgttcttgttaattttacgtaaaattcgaaaaacgcttcctgtgatgacttatactggacaggcaccagaacacgtctatgatttaccagatgaaaatgggcctgcggttgtgcgtcagttgttggcattaccaattacggagacagcaggggcggagagcttatccgcaacgattctagacttagttgctcgaaagaatctaacaattgatgttcaggaaccaaagaaggaactattccataaaaaaacgccgcaattttcattaacgctcgtcaatcgcaatcagttatcacattcagaaaagaagttagttagctggctatttgatgtgattggtgatgggcagcatgtcagtctatttgagattgagaaatatccaaaacggcatagtgcaaaactgttcaatcaacattaccatgggtggcaaacagcagtggcgactgaagcaagtcgtagcgggtggttacgagaacacatcgctgagttaatgaccagtttgaattattggttaatcggccttggcgccctatttttaattttgatttttggtgctttgattggcttagttgcttggtggacgctcattccgatggggcttgtcttcattttaaccgtctggcgtagatttaatttgcaactatggacgcaattgggttacgaaaaacggggcgaatggcaaggctttaaacaaatgctaaaggatatttcgacactcgatatggcgaatgtcccagatgtactattgtgggatcgatatttgagttatgcaacggccttcgggattgctgataaggtcgttaaagctttgaagattcgattgacgccggaacaacttcaaacaatgcctctgggttattattattactacgggtatactggggggttgaacatcggtcaatcctttacaacagctctcaatagtagtgttggcagtgcggtcagtgctgctaatccaacaagtgttagtggtggttctggcggcttttcaggcggctcatcaggcggtttcggtggcggttccggtggtgggactttctagtccaatcaaatgattaggtgaaacgccaacacactggtattatgagcgttattaaaatgtaattaacgcgctaaataagtgttagttggaggaggaaagcacatggagtttaacgatgtggttaatcaccgcaaggcaattcggtcatttgacccaaacaaaccgatctcggatgaattaatcgaaaaaataatggtgtccgcccaacgaacaccgtcgtggacgaattcacaaccttggaaagtctatgtagcgacgggtgaaacgttagccgatcatttagaacgaacgggaaaccggatgaaaggctactctgatttaaacgtgattcaccggacagactggggaccgttaatggctgagaacagtcgcgtgtggaatgatgaaatcagtgcctatcttggcgaagacgggttagcgaattttagcgatttacaacgccatctgttcaacgcgcccgccgtgacttacttgacggttgagcgcaaagtttcgccatggatgatttatgacatgggggcttttagtcagtcgattctgttagccgcggctaacgaacaagttgatacaattcctgcctatgaaacggccaagtatccagatgcggtccgcaaagcaatgggtattccggaaaatgaactgttgattggtgggattgccatggggtaccgtagtgaagggatgattaatgcgtttcattcgcagcgtagttcggttgcgagttttttaacgattaaacattaacaaattaaaaaagcgttcaaatcgatttcagatttgaacgctttttttaattgacgtgatcgttcgcactgcccgcaaaatcgaggcccatgcgttcaagaataattgtggcagtttcttcgatcgaacggttggcaacattaatcacttggcaaccaatcttatcatacaggtcttgggcgaaagccaattcagctttaatttcgcccatgtctgaataagtggtatcaggatttaacccataagcaatcatccgttcccggcgaatgttattgaggacttctggtgtattcatcaggccgataattttcttaggatcaacccgccagatttcgtctggaatgtgcgcttgtggcacgattggtaagttggcaaccttgatattccgattggctaaaaagagcgacagcggcgtcttagacgttctagaaacaccgagcaacacgatatctgcttctaagaaaccgtgggggtctttaccatcatcgtacataacagcaaattccatcgctgaaatgcgatcaaaataacgatcgttcaaatgatgtagtgccccagcttcaccagttggcgtgctgttggttttagcagtaatcatttgtgtcattggtgacatcatgtcgaaactggcaatttttttcgcttggcaataggtttcggcgatttcagaaagaccgttagtggctaatgtatggaccacaattgtttcttcaggaaccgctttgcttaagacgtccatgagtttctcttgcgtgtgaacgaaggggaagcggacgagatcaggtttaacgtccggaaattgggcgagcgctgcttgtgctaattggagggcggtttggccgactgagtccgaaagcacaaaaacggttaatggtttagattctggcataaggcatgctcctttattcacttttatagcgctatcataccataattatcgaaaaaatcgctagatttgaaaaaatattcaattaattccctgtgggttattgaccgtattttcaacattcgctataatagcaaagaacggttcacgtgaagttaaatttttaacgaacgtaaacggttatacttagcacgcgaggggagggatatcatatgggcaagacagtcgttcgcagtaacgaatctctagatgatgctcttcgtcgcttcaagcgttccgtatcaaaagctggtacaatacaagaatatcgtaaacgtgaattttacgagaaaccaagtgtaaaacgtaagttgaaatcagaagctgcaagaaaacgtaagaagttctaatttcttagataaaggaaatgattgaatgagtttacttgaacaactaagttctgatttgaaaacggcgatgaaggccaaagataagttgcgattagctgttattcggagtttaaagaccgctttaactaacgccaaaattagtgcggggcaagacttatcttctgacgaagaattaagtgtactatcatcacaacttaagcaacgtaaggattcattagctgagtttgaaaagggcgatcgtgcagatctcgctgaacaaacaaaagcagaaattgaaatcgtacaagcttatttaccagagcagctagatgaagcagcagtggtcaccattgttgacgaagcaatgcaggctactggtgcgacaagtaaggctgactttggcaaggtgatgcaatatgtcatgcctaaggtcaaaggacgagctgatggcgctatggtcaatcaagtcgttaaatcaaaattaagttaattttaggcgggacttcctctggggagtcccgctttttttttatggtcgttaattcagattttgataattgaccataaattcgtgaattagcgcggctggctacttttaaaacggttgttgtttgtgatagaatgatggtagttttcattctaaaacaaatgaagttgaaacgtgcggttgcaacttgattcttcactttacgacgtgtagttaataatcgactaaagtcgtttattttctgggctagataatactcagaatcagttgcagtcacactctggaaggagttatctttgttggctgaaacagatgagcgtttatttcaattggcaacgccaaatttagcggccgctttaatgggcacacacgatacttttttaaaaatcatcgaggaaagcttatctgtcgaactgattgcgtttgacgagcatattaccattcgcggcgaacaaccagcagttgaccaagccgcttctgttttagaaaacttagtggcgctgttacaacatggcattaagctcaatagtagtgatgtggtgagtgcgacgaagatggcccaaaaaggcacgattgctggtttccaagaactttacacggagccattaatcaaggatcgtaaagggcagcatattcgcgtgaagacattcggtcaacgtcaatacgtgaatgcgattcgtcaaaacgatgtcacgtttgggattggccccgccggaacggggaaaacattcttagccgttgtcatggccgttgcggcgttgaaacaaggattagtcgaacggatcattttaacgcgtcctgcggttgaagctggtgagagtttaggctttttaccaggtgatctaaaggaaaaggtggacccttatttacgaccgatttatgatgcattgtatgccgttttgggtaaagaacatactgaacgtttgttagagcgtggtgtcattgagattgcaccgcttgcgtatatgcgtggccgaacactagaagaagctttcgttattttggacgaagcccagaatacaacgcctgctcagatgaagatgttcttaacgcgacttgggtttaactcgaagatgattgtcaacggcgatattagccagattgacttacctaagaaaacaatgagcggcttggtgcaagctgaacatattttgcacgatattcctaagattgctttcgtacagttcagttcagaagatgtggtacggcacccagttgttgctaagattattaacgcctatgcggcgattgaaaagatgagaaagtaggaacacttgaatggatatccaaattatcgatgaaacaaaagtagttgcagaagcaaacgtaaaactggtcacggatattttagaatatgccgggcaacaattagatttacctgaagacacagaaatgtctgtcacgtttgtgacgaacgaacgcattcgccaaattaacaaggaataccgcgatactgaccgtgcgactgatgtcatcagttttgcaatcgaagaagatcctgaagaagaaggattaccagccaactttgaagaactattcgacattcccaagaatatcggtgatttgtttgtttcattagaaaaagcagctgaacaagctgaaacttatggacattcatttgaacgtgaattagggtacacaatggttcacggcttcttacacttaaatggttatgatcacattcatagtgaagatgaagcacaaatgattccattacaggagaagatcctcgatgaatttggattacaacggtaaaaaaccacaaacgggcaagaataaacatttttggcagtcactacgccacgcactcggtggattatggaccgcctttaaaactgaggctaatttacggcgtgatgcctggttttcactcgttgcgattgctttcggtatttattgtcagttacattatttagattggttagcgattattttcgcgatttttatcgtttttatggctgaattttggaatacagttatggaacatctcgtggacttattagtcgatcaccagtaccatccattggctaagcagattaaagatatcagtgcagccagtgtcttaatcagcacaattttagcgctattgattggcgccattgtctttggacacgccatatttaactaaaaaggggactattatgtcagaaacatatcgctcaggctttgtggccattgttggccgaccaaatgttggaaaatcaacttttatgaatcgaatgatcggtgaaaaaattgccatcatgtcatcaaaagcacaaacgactcgcaataaaattcaagggatctacacggatgacaacgcgcaaatcgtgttcgttgatacaccagggattcataaaccacataatgaattagatgaatacatggatcaagcagcgctatcgacgtttaacgaagttgatgccattttattcatgattagtgggattgataaaaaagggcctggggatcaatacatcatggaccaattgaagaacgtcaaaaaacccgtttatttggttgttaacaaaattgacgcgattcatccagacgatttattaccaatgattgaacaatatcggcatgaattagatttcaagggggtttacccaatctctgcattagaaggtaacaatgtccctgaaatgttaaaagaattggaacaaatactcccagaaggccctcaatactacccagaagatcaattaacggatcacccagaatatttcgttgttggtgaattgattcgggaaaaaattcttgaattaacgcatgaagaagtgccccattctgttgccgtggttgtggaacggatgaaagaccgcgtcaatggtaagctccagattgaagcgaatatcattgttgaacgtgatggtcaaaaacggattatcatcggtcaaaagggctccattatcaaagaaatcgggattcggtcacgtcgcgaaattgaagctttacttggtgaaaaagtcaacttgaagctctgggttaagattcaaaagaattggcgtgacaataaccaatacctccgtgaatttggttacaataaaaagagattgtaggcttaagcaatggcggaacatcgattcgaagactttaatggtctagtgatgtatcggaagaactataaagaaaaagatatgctggtcaagattttgaccgatcgctttggcaaaaagatgttttacttacgcggtgcgaataaaccgaagtttcgcttgagtgcggctattttgccatttacccaagctgagtacggtggcgacattcgcgatgatggcttatcctttttaaataatgtcaagtcggcgagtcagtttcaatcgattagcaatgacttgtttttaaatgcctatgcgacctatatcttaggcttagtcgatgttggttttccggatagcgaaccgctcggcagttggtatccgaagattgaacaggcactctcattaatcgatgaaggctttgacgcggcgatgattacgcacattatcgagattcagatgttacaagtcttcggggtgcagccacaactgcaagtctgtgcggtttgtgggcgttctgatttgccgtttgattattctgagagttatggcgggctgctttgtcaacgccactggcacttggatgttaatcgattccacggtagtcaacgggctatctattatctgcgtcttttttcagtgattgatttattcaagattcaatcggtcaacgtcaaacagacaacgcagatggagcttaagacgatgatcgaccggatttatcaagacacggttggcctatcgctcaagagtaagcaattcatcgataagatgtacagtttcgatagtcaattaccacaattaaaaaaagtgtcgtcagaaattgacagcacgccaaaagacgactaaaatagtaatcaacttaatagacgttgaagaaaagggtcccttaagacggtcagacagtgattctaggtgagtgagaactagaacaagacttgagtggattggcgtttcggagtcataccaatgaagcagcagctcgctttgagctgaagtagggtggaaccgcgagtaatcgtccctatgtgacttaacagtcgcataggctttttttatgcgcaaaatacggaaaagaggaattgaaatggttaaaaagttaaatgtgcaagaaatgattttaaccttacagcgtttttggtctgaaaaaggctgtatgctaatgcaatcttacgatacagaaaaaggggccggcacaatgagcccatacacgttcttacgggcaattggaccagaaccttggaacgccgcttacgtagaaccttcacggcgcccagcagatggtcggtatggcgaaaaccccaaccgtttattccaacatcaccaattccaagtggtcatgaaaccagccccattaaacatccaagaattttacttggatagtttacgggctctaggcatcgatcctttggaacatgacattcgcttcgtcgaagataactgggagaacccatcaatgggttgtgccggtgttggttgggaagtttggttagacgggatggaagtgactcaatttacctacttccaacaagttggtggtttgcaatgcgatcctgtgacaagtgaaatcacatatggcgttgaacggcttgcttcatacattcaagatgtcgacaacgtgttcgaacttgaatggggcaatggcgtgttatatggcgatatttttaaagaacctgaatatgaacattcaaaatatgcttttgaagacagtaaccaagacatgcttttgaaattcttcgatgaatacgaaacagaagcaaaacgtttaattgacttaggccttgttcatccagcatatgactatgtcttgaaatgtagccacacattcaacctattggatgcccatggtgccgtttccgttacagaacgggccggttacttgtcacggattcgccggatggcgcactcaatcgcgcaagcattcgttgctgaacgtgagaaacgtggcttcccgctcttaaaacatgctcaagaatcaaacacggaggtcgttaacaatgactaaaccattcttattagaaattggcttggaagaaatgccagcccacgttgtgatgcctagcatccaacaactagaaaagcgcgtacgcgactttttagaagaacaacacttaacattcgggaccatcaaaacttacgcaacaccacgccggttagccgtcttgatcgaagacctagcggacaagcaagctgacattcacgaagaagcgaaaggccccgctaagaaaattgcgcttgatgctgaaggtaactggagtaaagcagcgcaaggttttgttcgcggccaaggtttaacgaccgacgacattacttttaaagcactaaaaggcgttgaatacgtctatgttgaaaaatcaatcatcggcaaacctgttgaaacaattttgccagaactaaaagccgtgattatggcgatgaccttcccaacacggatgcactgggccgattacgacttcgaatatatccgtccaattcactggattgttgctctattagacgatgaaattatcgatttcagtattttaaacgttacgacgggtcgcacaacacaagggcaccgtttcttaggtcaagccgtgatattggcaaaagcaactgattacgaagcaacgctggaagcacaattcgtaattgcggatgaagctaaacgccaaaacttaattcaaactcagattgaaacaatggcccaagaaaacgattggcaagtcgatttagacgcaaacttgttagaagaagtgacgaacttagttgaatggccaactgctttttatgggcaattcgatcctaagtatcttgaaattccagaagaagtgttgattacctcaatgaaggataaccaacgttacttctacgcacgcagccaagcgggtgatttattacctgttttcatcggtgttcgcaacgggaacaccgacttcatggaaaatgtcattgctgggaacgaaaaagtcctcacagcgcgtttggaagatgccgatttcttctaccatgaagatcaaaaggtaacgattgaacaaaacgttgcgaagttacaaaacgtgtcattccacgacaagattggtagtctggctgaaaagatgacccgtgttggtttaatcgcgcaattcttaggccaaaaatttggtttatcagaagcagaattagttgatttgcaacgggcaagtgatatttataaatttgacttagtgactggcatggtcggtgaatttgccgaattgcaaggggtcatgggtgaaaaatatgccttattacaaggtgaaacactagccgttgccacagcgattcgcgaacactacatgccaattagtgctgaaggtgcactccctgcaacaaaggtcggcgcggttttagcaatcgctgataagttcgatagtatggctgatttctttgcagtgggcatgattccaagtggttcaaacgatccttatgcattgcgtcgtcaagcttatgggattatccgcatcttagaaaaccaaaactggcacttcccaatggccgattatcaagctgcgatgagtgacattgttaagcaacaagctgatttcaaccttgattggtcaaccaatgctgacgcgatcagcgatttcttaacggatcgtgttcgccaacgctttaacggcatgcggcctaaagtccggcgtgatatcgtagatgccgtcttgaagaatcaaagtcaagatccagtcgtgatgttcgaagctgccaaagtgctttcagaccatcaagatgatgcagatttcaaggcaacggttgaagccgtgacacgtgtgttacgactcgctgaaaaagttgactttgcaacaactgatttaacggttgatcctgcattattcgaaaatgaagctgaaaaagcactttacacagcggtcgaagacttacgtggtacaattgctacgaacccattagctgataattacggcatcttacaaacactacgaccattaatcgaagcttactttgatgccacaatggtcatggctgaagatgaagctgttcgtcgaaatcgcttaacacagttgatgattatcgctcaaatcgcccttaccttaggtgatttaaacgaattgattgttaaataaacaattcaaaaggggataatagcatgttacaaatgaaacgggtttatgaagcagcgacagactcagatgggtaccgaattctagtcgatcggatttggccccgcggcatttcaaaagaacgtgccgctattgagacctgggcgaaagaaattaccccaacgactgacttacgcaagtggtttagtcatgagccagctaagtttcccgtttttaaagaaaagtaccttgctgaaattgcagctaatccagcttggccggcgtttgaaaaggtagtgcacgagcaccttgagctgggcaacgtcacgttagtctatgcggcaaaggacctgcaatataatcacgttgtcatcttaatgggacttttgaaaaaggaccttgacaacgaatgagatagtttgctatatttatttgcaactgtacctaaatggtgctatgatatatagtgtatttttgtgctgataatccttaaaagtcgcatttcattgtgaggtgcggcttttacagtcttagtacaatttgaattgaatagtgaggtgagaccaatggcgggaaagattccgaatgacgtgattgatgatgttcggagccaaactaacatagtggatgttgttggtcagtatgtccagctcaagaagagcggcaataacctatttgggatttgtccgtttcacgatgagaagaccccatcattctccgttagtgaagagaaacagatttttcattgtttctcttgcggacggggtgggaatgtcttcaagttcttgatggaactggaacagattagttttccagaagctgttacaaaaatcgctgactttgtcggcttcagtttagcggagacttatcgacccactcaaaatgttcaagaatcaagtgaagtgacgcagtttaagcaactctatcgtcaggccaatgaactctttacgcatattttaatgagtactgaagcgggccaaccagcgttagattacttacacgaacggggcttgacggatcaattaattgagacgtttagtattggctatttaccggatcaaaccgatttaatgctttcattcttccagaataaagaagttccgtaccagacactacgtcaatccggcttatttattgaaactcagaccggcaagctgcatgatcgtttttccggccgagtgatgtttccgattcggaatgcgcaaggtgaagtgattgctttttctggccgggttttggtgaaacaaccagatcaacccaaatatttgaacagtcctgaaaccgtgatttttaacaagcggaaggttttgttcaactatgatttagcaaagactgctattcaccaagaacgcaaagtttacctgtttgaagggtttatggatgtgattgcagcgtattcagccggtgtttcaaacggtgtcgcttcaatggggacgagtttaacgactgagcagttgggaattttagggcaacaggctcgggaattaattgtctgttatgatggtgatcgtcccggaatcgaagcgatgaaacgcgcaattaccatgttgcagcaaaataccaagcttgaattgagtgtggtggttttgcccagtggcgctgatccggatgaatatgttcgccaatatggtgctgaacaatttaagacaaccttgcaaaatggtgctgaaacaccgattgcatttgaactgcggtatttgaagcaagggttaaatctggataacgagaaggatcaacttgattacgtgcaacaggcattatccgtcgttgcgccaattgattcgccgcttgaaatcgagatttacctcaagcaaattgaagccgatagcggcattacccttgatacgttgaagcggcagttacaaacattgcgcgttaaacgggcaacgcaacaaccactttcaccggcatctagtcagtatgattatgacatgccacctgaaccggatgacgcatttgtgggtggaccaccgccaatcattggtgatccgcgggcaacagcgacgcgtcagccacaacggctaacccgggttgaacacgcggagcaagaagtgttgcatatgttgatggctaatgacgatatgcgcctgcaattggagaacaatgccgattttagttttgtgcataccccgtaccaactgatttacgagttatggcgcgcctttttagctgaaggtaagtcgaccttggccgacttcatgggttatatcccagatgacttacaagccttagtcgttcagattgatgcgcttgacttaccagaagaggcaagtcaagaggcgttaaacgactgtctgttcgtcattgcgcaaaataacgttgaggaacaattaagagaagcgaaaattgccttaaaagaggcgaccaaattggggaatgcgagcgaagaaacgcgcttaaccctggaggtcattagacttgtttcgcaaaagaaattaggaaattgatattaggaggtttctgaatggctgataataaaaaagctgacacgaagaaatttgatactgcggttaaggctttaattaaggaatacaaaccaaagaaagaaatcaccaatgatgaactcgttgcaaaaatcgtgaaaccatttgcgctacaagctgatgaaatcaatgaattaatgcaaaaagtggaagaccaagggattgggattgtcgatgaagatgggaatccaagtgccgctacccttaaaaaggaaaaggtttctgctaaagaattaaaagatatgactgcaccaaccgggattaagattaacgatcctgtgcggatgtacttaaaagaaattgggcgggtatctcttttaaacgcccaacaagaagttgacttagccttgagaatcgaacaaggtgatcaagaagccaagcaacgccttgccgaagctaacttgcgtttggtggtttcaatcgctaaacggtatgttggccgtggcatgcaattcttggatttaattcaagaagggaacatgggcttaatgaaggccgttgaaaaattcgatcaccgtaaagggttcaaattctcaacatatgccacatggtggattcgtcaagcgattacgcgtgcgattgccgatcaagcccggaccattcggattcctgtccacatggttgaaacgattaacaagttaatccggattcaacgacaattacttcaagatttgggccgcgaaccaacgcctgaagaaattggtgctgaaatggatatgaatacggataaggtgcgcgaaatcttgaagatcgctcaagaacctgtttcccttgaaaccccaattggtgaagaggacgattcacacttaggcgattttatcgaagatcaagatgccaccagtcctgaagaacatgcttcttatgaattgttgaaagaacaattagaaagtgtcctagataccttaacagaccgtgaagaaaacgtcttacgtttacgtttcggccttgatgatggtcggacacggacattagaagaagtgggtaaggtgttcggcgttacgcgagaacggattcgtcaaatcgaagccaaagcattacggaaactccgccacccatcacgttcaaaacaattaaaagactttttagaataaaagagtgcgtaagcaggcggctatattttgagggttagcatagtcaggcgaataaccaacgatgttggttgtttgactgacgtagctagccgcagaaatatgcctgctagagcacgttttcgataaagtgcgtttagttacgggagcaactgagcatcaatacaatattgtcattaattcagattttagaattaatggcaatgttagattaagcggaagttgttgaactaaaaagcacgtttaggcaatcaataaaaaggccgcaagctaacctagcttgcggccttttttgcgtgtatctaaacaagcagagcaccaatccccactgctaaaaatacaatccccatcaatgcacatgaccataacgccatgggtatgaagactgaagtactgtggtttgcttcaaccttcaaagtcttgaatgttttaatggtcattgaaagttggaaaataccgatgattagcattaaaatcccaataattggtaaccagttcatgttaccatccccttcactgtaaataatttatcttatgttaactaggatttccgaaaactaataaagctcaaaaagaaggggctaattgacgtttataaccaattcaataaactagcaagactaatcccaataaagacaagccccatgaaagcactcgaacagagcgctgctggcgcaaagacagaagtattttgatctgcgtgtaattttaagtcttgataatactgatacgacttataaatttgaaaaatgcctaaaccaatcatgaaaacacagaatagttgcaaccaactcatgagaccactccttaatgtatagaaagcgttttcgatttaatttcagtataaaactaaattttgcctaaagcaacttctgctatccagaatcaagtgttcactttgactgcgtatgccgtctaaaatttggtatactaactataacaatcaaagtttctagaatggagttttatttttgtcaccaattcatttatcaaagcgtttagctgcggttgcgcagtttgtcccacaagatagcattgttgctgatatcggttcagatcatgcatatttaccaatttggcttacggaacaaaaccggttgaagggcgccattgccggtgaagtagttgccggtccgtttgaatcaacacagactcacgttaatcaatggcacttacaacaacagattcaagtccgcttaggcgatggcgtagaggtattgaatcctgaagaagaccatgtgagttgcatcgtgattgccggcatgggtggtttattgatcacggaaattttaacccgtggattggatcatctgaacggccatgaacgactcgtgttacaacccaatatcatggaaagtactgtccgtgaatggttgaatgcacatgactatgcaatcgttgatgaagcgattgtcgctgaagacgggcatatctacgaagtgattgtcggcgaaccccaaccatcagttgcaccattaagcgaaagtgatcgagtgtttggccctgttctccgccaaacacaacctgctgatttccaattgaagtgggggacaatgttgaaaaaacggcgtcatttattgcaacaattacaaaacgcacaagtcgtacctactgataaagtcaaagcagttgaacatgaaattgcattaatcgaggagatgaagacatgggaaaattagtcgcgagtgacttaattgctgcgattgaagactacgcaccattggcattaaaagaaggcaatgaccccaccggttttcaaatcgggcgacgcgataaaagcattgaacgggtgttagtaacccttgatgtccgcccagaaaccgttcaagaagcgattgaacagaatgttgattttatttttgcccaccatccagtaatgtttcgcccagcgcggaatctcgatctaagtgatccgcaaaacaagatgtatgcggatctgttaacgcatgacatcacggtatatgccgcccatacgaatttggataagactaacggcggcatgaatgattggctagctgaagctttacaactaaacgatgtgcaaccgtttaacatcacggactaccaatcattagtaaaattggtggtctttgtccctgagtcacatgctgaacagatgcggatggcattgaatcaagctgacgcgggacatattggcgattatcaagcctgcagttttagtacgaccggaatagggcgttttcaaccaacggacgcagcaaatccttatatcggccaatcaggtgatctagaagcggttaccgaagttaaaatcgaagttgttctgccagtggccatgcaaaccaaagttgttcaggcgatgcttgcggcgcatccttatgaagaacccgtttatgatgtgattccattagctaatcaacaacaaccgattggtattgggcgcattggtcaagtcgctcaatcaatgacggtccgggattatgcgcaatttgtctgcgaaacatttgatttaacaggtctgcgcttaatttcaaatgaaccggacaaaatagttcagacagtcgccgttgtcggtggcgatgggggtaaattcttcccagccgctttacaagctggtgcggatgtctacattaccggtgatgtgtattatcatactggtcacgatatgttggcagctggtttgtcagtaattgatcctggtcatcatgtcgaaagtattgtgaaggataagatgacaggaatttttgaaaagtgggccaaacagcgtggttggtcggttacattcattaaatcacagcaaaaaactgatccgtttacatttatttttaatgcgaagtaggttagaatagaattagtattaaataatatctaggaggctacaccatggctaaatatgaaaaattgattcctcgttttctagaatatatcacaactgaaacacgttcagatgaaaacgcaacaacgagcccatcaacccaaacacaagtggtatttttacacaaattgatggacgacttgaaggaaatcggattaagtgatgtgaaatacaacgaaagtaatggctatgtaacagcgctattaccaagtaatattgataaaaaagtgccaacaatgggctttttatcacacgttgatactgccgacttcaatgccaaaggtgtcaatccacaaatcgtcgaaaactatgatggcgaatcaattattaaattagatgatgcgggtaaattcgtattagatcctaaagaattcccaaatatgaaaaattataaaggccaaactttaatcacaactgacggctcaacattattaggttcagatgataagtctggggttgctgaaatcatgacagccatggacttcttagtccaacatcctgaaatcaaacatggcgacatcaagattggttttggccctgatgaagaaatcggaactggcgctgatcactttgatgccaaagatttcgcaaccgactttgcttacacaatggatggcggtccaatcggtcaacttgaatacgaaacattcaacgctgctgccatgaaagtcgatattcaaggtaaaaacgtgcatcctagtgaagctaaaaacatcatgatcaatgcccttcaagtggctgttgatttccaaaatgctttaccaagcgatgaagtccctgaaaaaacagacggtcgtcaaggtttctatcacttattaagccttgaaggcacagttgatgaagcacacatggcttacatcattcgtgatttcgaacgtgatggtttggaagaacgcaaagcatttgctgctaaagttgctgatcaaatgaatgctaaatacggtgaaggccgcgttgttgcaacaatcaaagatcaatactacaacatggcagaagtcttaaaagatcacatggacgttgttgatcttgctaaagatgcaatggaagccgttgatatcaaaccattaatcgaacctgttcgtggtgggacagatggttctaagatttcattcatgggtattccaacccctaacatctttgctggtgctgaaaacatgcacggtcgctacgaatttgtttcaatcgaaacaatggaaaaggccgttgatacaatgcttaagatgaatgatttaaacgttgaacggaactaatcaacaatctaaaaagccccgcacaaattgaatttgtgcggggctttttttgtgcggttaattttgatgcattgtcaacaagcctttgagttgttcaatgggtaattggcctggtgcactggggtgttcaaggtaaccgaaactcacagctgaaccgaattgaccaccaaaaatgcgagaggctaagccaaattcagacatcgccatcgtgatcagtggggttgtgtgatcatgtgtaaaagactgggtaatcgccattaaccgagtagtatcctcattactttgagcggtagttgctagttttaacatatctgggtgcgtcgcatgcattgctgcgagttgtttttgaagtgttagattatcaggggttgtctttaaatcgtgatggcttagtaacacttgatagccattcgcacgtgcaagcgcgctgacggcttttctaactgcctcaggtaaagaccactcaatatcaaccacatcgccgatttgagccgataatagagctgtatagcggtctaaatagtcggttggatcagacaggccgccatcatgggttgttctgagcgttaaaataacggggtgcttgcaggcggcaatttggtgaccagccgttaataaggtcgctggtgtttgccaatagtctaagcgccattctagaatatcaatcgcagcttgcttttgctcaacgagtgccatttcacgcacacaatcgtctaggttacgcggcattaaggaaacggccgtttgtgtctggccagtgccaacatggagggtcatcaaatgacctcactttctaatcaaaatggataaacaatttttaaatcgataaggtctattttaagagaaaaagttgtttaacgcaataaacttaaccaattaaataacaaaaaagaaccaccaactggtagctcttttatagggattgattaatatgagcgacacgatattgaccatcaattaatttaaacgttcaaatttcgctgaaacgttcaatataagccgcttcacgacgttggtcattaaccgtggctgtctgccgctcatcagtgaagtaatcgcgcatttgcgctgtcactagaatatcttggcggttcggtttttcaggtaataataactcagttgaaacaatggcgatactctcaagttggttatgtttatggtgccgttgataacggtttaagatgcgttgttgttggtgctgaaaatggggcgtcattaagtccgccacgttgcttaagtcatttgagggccaagctgtttcaatttgatagaatgcattttcaaagcgcgccgcggtttcagcatctaacggcatggtatcagccagtgcccgttttctacgtccggttaaccagtcacgcactttacgccaaatcatgatcccaagggagacgaatacgaaaggcagggtgactatactatcgaataaacgacgcattggggacttgtagtaatgccgacatcccgcatcatcgtaataataatcacgactacggccgccaacataactggatgtcggtgaagacccaccaccgctaccacccgaaccaccagagccacccgaagatccgccagcacgcgcagcaactggacttggtaataaatataattacatttcgtctctcaactggcgagaatgcgacataatctttttcgtgagtttgcttcattatttgtaaataattctggtaatttaacaaatagcctcttccatgctccgattctactaaagtcattttataagtctcatttatcgatttaaccgacctgtaaatcgttttttgagatacggcaactacatcggccaattcatttgctgtcatgtaatctccattctttaacaaagcattcaatatctgattcatataaccagtcatattttcctccttatgtttatgatagcgctatttttattaaaaaaagataaacctttgcccgttgctacggtcattcttcttgtttttctttattctagtacatcttgtgtaatgtatacaaaaagccctaccgtattccggtagggcttttcgttgtgtggagttgctattaatattattttttggtacatccttagtgtagcaaaacctgggcagcattccagttacaagttcagcgaattgtccggaaagtgaacaatatcactaaattgtttagtcacttttaacgattttctcaagctgcttcaaattaaaacataaccgctcatcaatcacctccggttcggtctgcagattattttcaaaccaacaatctaattggcgaatgattgcaccgccgtaaaagtcttccaagtgatttaactgttgtggcgtgtattgtgctttgtaatggcgcaatgccttatgaataatctgtttcataacctgttcaaaaaagcggcggcgttccggataatccgctagatgatataaattcaagcaaaacatgcgataccgtgtaataaattgaatggcttcatgacagccggattcccaatcgccactcactatactctcatcaactttttgaataatttgttgttcaagtgtccaccaaaataagccgcacatgcccgttggaaaatgattataaaaggtcgttcgtgacaaattagccgtcttcaaaaaagtcgcgaccgtcaatttcgtcgctttttgatccattaataattcgattaaaatcattgccatatagcgcttagtcgcttgtcgtcgtgtcatttacccacccgttctaattactattgttattttaccaataaacaatcattaacggtaatattattaacaaagattaattttatagcaatgaaaacgttatctaattattatcgattgcacaaaaaaagcggtgcgaatttgatattcgcaccgccttaacacattaattatttttctaaaccttccgcaactgcttctgggtagttggctgtgacagttgcagcacaacgcgcacaaagcattgggaacttatcatctgaaccgatatcagtcttaatcatccgacaacgatcacaaacatccccctcagcatgcgcaacactaaccgaaatgccatcaaattgagtagcttctgttggaacatcggctgattgatccgcaattgttaattgtgagacaatcaataattgtttaacatcagcatccaatgaagctaataaagcagcattggcttcgtttggataaagtgttacggccgcttctaatgacttaccgatgaccttgtccatccgggctgtttcaagagcttttaagacatcgtcacggatccccatgaaggcattccaagtttcaactaagtcttcttcaccggcaaaatgttcaacttctggcatttcagctaattgaacgaattcttctggttcgtgtaagtagctccagatttcttcagctgtgtgtggcaagattggtgtcaataacttcgtcaaggctactgctactgcatagaaaacagtttgtatgttacgacgaggtgcatcattttgaccatcgatataaacaacgtctttggcgaagtctaagtagaaggctgataattcgttcgtcaagaacatgttaattgtcttataaactgtggcaaagtcgtaagcatcatacgccgctttacagctggcgatgattgcgtttaagcgcaccaacatgaacttatcaactgaacctaattctgcgtaatcaactgtatctttagcaggatcgaaatcagttgtgttcgcaatcatgaaccgcattgtgttccggatcttccggtaagcttcactgacttgttggaagttttccattgtgactttcacgtctgagctagcatcaactgaagcgacccagaggcgcacaatatccgcccccatttgtttgatgatcttttcaggcaagattgtgttcccaagtgatttactcatcttacgaccgttaccatctaagacaaagccttgtgaaataacagctttataagggctgacttcgccaactgcaacactggtaattaaacttgagttaaaccagccacgatattgatctgaaccttctaagattaagtccgctggataagttaagtcatcgcgagccgctaacacagcttgatgtgatgaacctgaatcaaaccagacatccatgatatctttttcttttgtaaattcaccatttggactcccaggatgtgtaaagcctgctggtaataagtctttagcatcccattcaaaccaaacgtttgaaccatgctctgcaaagagttgcgccacacgttcgattgtttctggcatgacgatttctgtgccgtcttcagcatagaagattggtaatggcacaccccatgcccgttgacgagagataacccaatcgccacgatcacgaatcatgttgtaaagacgggtctttccccattctggcatgaattcaactttttcgatttgtgctaagatttgatcgcggaacgcatcgattgaagcaaaccattgggctgttgcccggaagataacgggtttctttgtccgccagtcatgtgggtaactatgcgtgaagaagtcgagtttcaataatgaaccgttcttttcaagcgcttctgtcaccattgggttggctttatcgtaataaacgccttcaaaaccaggggcatcttcagtcataatccctttgctgtcaacgactgaaaggactggtaacttatatttagtgccagcgttataatcatcttcaccgtgacctggtgccgtatgcactaaaccagtcccagtttctaatgtcacgtggttgcctaagatcaccaatgattcacggtcatataatgggtggcgggctgtcattaattccatgtcagcacccttgaaagtcttcaagatttcaactgattcccaaccaagaagatcagtcatcttgttcaaacgttctgctgccacaacgtatttttggccgtcagctaacacttgaacgtaatcgaaagctgggttaaccgcaatccctaagttagcaggaattgtccatggggttgttgtccagatgatgaattttgtatccgcatctaataagtctttcccatccaccacgttaaacgccacgtacattgatggtgacttgatgtctttgtattcaatttcagcttccgctaaagttgattctgatgaaggtgaccagtaaacgggcttcttacctttatagatataaccttttttagccatttcaccgaagacccgaatttcttcagcttcaaaatcagctgttaaagtgatgtatgggttatcccaatcagcagaaatcccaagacgcttgaaatcttcgcgttgcttgttgacttgttccatggcatagtcgtaacaaagtttacgataatcaacgaggctcatttctttccgcttgataccctttttagccaaggcttgttcgattggcaaaccatgtgtatcccatccaggaacaaaaggtgcgcggaacccgttcattgatttgtaacgaacgataatatctttacttgttttatttaaggcgtgacccatgtggatgttgccgttcgcaaatggcgggccatcatgaagaacgaatgaaggtttaccttcatttaatttttgccgttgttgatagaggttgttatcggcccaacctttttgccaatcgatttcacgattcggtaaacctgctcgcattgggaaagctgtcttgcccaggtttaatgtttctttgatacgcatcaaatcactcctttatttttaaaaacaaaaaaagatcccgccctgaataggacgaaatcttcgtggtaccacctaaatttgaaggtcaatgaccttcctcaacatgcaataacgcgcattaagcgtcccaaattactcaattcatctggaatgaaataaggtgatacaccgctaaacagagcattaccaaccttccaccgtcgttggctcgcttaaatgatgttttgcttgctagtccttatttaaatctgttgcttggttttcaattgggttgtaagaatccgtaacagcttcaaccacttcatctgaatcggtgtcttcgactacatcggagagcacttcatcattgtcatcttcttcgactggtgtttcttcaccagggaaaataatggtttgcgttgttgtcacatcatcttcagcaatttgaccccaaggtttaacttctgcatccgagtttacttgatttgacccatggttgtcaaggtctgtcatatcaatttcagctgaaagagcttgatggtccgctaaatcatctttagctaataaatctgtccattcaggactcttaaccacttctaattgtgattcaagcataacttgtaatctttgacggaaaatccgtgtttgtttcttcaagtcatcggtttcgattgcaatttgttttgcacgttcagttgcatcgtcaatgatgtggtttgatttttcagttgcatcatccaacattgattttgcattcttttctgattcagtttgaatcatttcagcttcttttttagcgttatctttaacacggtcagccgcttcttgtgcaacaatgattgattggttcaacgcatctttcaattcattaaaatacgttactttttcatcgcttgattttaattccgcttttaaactttcattttctgttaaaactgattcgtagtctttaatcacttgatctaagaaatcattgacttgatccggattgtaaccccgcatttttgtgttaaattctttgttatgaatatctaaaggtgttaaaaccattttgaaattcctccatctttttcagcaattattttcttaaaatccccagtgtcactcgatatttttctttacgagtctgaccatcaatcgattggagttgaatccggccaaaaccacgaacagagacgatatctaatagtgctaattcaaaatctggtttatcaaatgcttgccaattcagtttaactttgttggcttgaattaattctttagcgcgttgtcgcgacagattgtaaacagttgaaatgatcgtatccaagcgaaacgagctgacagtcgtttgttcgaattgccaagcgtccttaggcgtcaacaactgtgtatagtcttgttcttgcaaatgaactgatacgcgaccaatcttagtgatttgctcttcgacatagcctgccatcttcttcgtcacaaagaattgccagcgttcttcatcggtcataatatccccaaaaacatcacggtcaatgccagcattcacaagcgtgccaagcaccttcccatgtgataggtttgcaaatttaatcgggtaccgaatctcaaataattgaatctcaaaatccgcatccgttggttcaaagtaatctggagcaatcattgcccgtttccgttcagcagcgttatatccgccattaaagtgataacggacgtcccctttttcaccgaccaaggtttgtaaaataaacgcttgacgcggatctaaaaacgccgttaagattggtcgatattcaacttgtgcttgctcaatccaatccaaaacctgcgcaacaaatggcgcctcgctttttctaaaatgttgatagacatctgcttgattgaccattgattacatccccactaataattgtgcgagtaagccgatcccacgttctactaaatataaaacgaaaaacgcagcaatggctgaaatcccaataccaccgattgcaggaatgaagcggtcaaagatttctaagaaaggttcaactaacttagcaacaaagcgccctaatttactgcccatcgcctctggaatccacgttaataaacaatagattacgacgatgccactataaatccgtaccacatacatgagcatcaagagcacataaaataaaaatagttgcacctagttcacctcaatatcaaaatcattttgatcgacaatatctgaaagattaccatcgatttcatagttcggtggcgtacataagaaaatctgatcaccaacccgttgaatttcaccgttgatggcaaaaactgcccctgttaggaaatcaacaattcgagtggcttgtgtcgcttcaattcgtgtgaagttaacaatcactgctttattttcaagtaaacttttgccgactttttttgcgtcggaataaatccgtggttcacataagacaattttattcattttagtagctcccgcagcttgcatcgagacgacgttattcgggcgaacacttggttcaccttcattagtgacagccgcagtttcttgcgtattagcatattcatcttcatctgacatgccgaaaaaattgctaagactaaacttaccagccatgagtcatcctccttagttattgcgacggcgcttgaaaaatggcggcacatcgtccccattttggttatcttgcttattatcatccgcttgggctgtccgtttgaagatatcgaaatctttcttttcaatttcatcaaatttttcagttgcttgcgcttgctcgcgggcacttggttcgcgacgcatatcccaatctacaaatggatcattattttgttctgatggtgttgaaggcgctgttgtctttggtgctgaattgtttgttgctggacgacgtttgttgttatcttcatcaatcccagttgcaataaccgttacaacaacttcatcaccaagattttcgttgattgaagtcccgaaaatcaagttaacatcgttagttgcagcttgttgcacgataccagcagcatcttgcgcttcaaacaatgacaagtctggtccacccgtgatgtttaagaggacttgttctgcaccatcgattgaaacttccaataatggtgatgaaatagccttcttcgttgcttcagctgtccggttttcacccgttgctgaaccaattcccatcaaggcagagccttggttagccataactgttttaacatcagcaaaatccaagttgacaaaccctggtgatgtaattaagtcagaaatcccttgaaccccttgacgtaaaacattatcggcttctttgaaggcttccatcattggtgtcttcttgtcaacaatttcgagtaaccggttattagcaatgatgaccattgtatcaacatgttgctttaattcagcaatccctgaagcggcgtttttaccacgtttagggccttcaaatgtaaatggacgagtaacaacccccaccgttagtgcgccaagatctttagcaattttggcaacaacaggggcagcgccagttccggtaccgccacccatgccggctgtgacaaagatcatgtcagcgccttttaaggcttcgttgaggacttcttcactctcttcagcagctttttggccgatttcagcagttgcgccggcaccgaggccgcgagtcaacttaggtcctaattggatctttgtttcagcttttgaatcttcaagtgcttgaacgtcagtgttagccgcaataaaatgaacacctttaacgccttcgttgatcattctgttgacagcgttaccaccagcaccaccgacgccgattactttgatgattgcgccgctattttcttgtgctgcatctaatgaatattccatctgtttttcctcctgttacgactagcccttattcaaaaaagttactaaagaaatttttcaggccttcgaatgcattttttgattgatttttaggtttggttttcttacttggtacttctttggttgttgcttgaggtttcattgttgatttcgtcactgtttggtctaattcagtctgtgctacattcccaagtgcgccttggaccaaccaatcaacttccgacaagttagctatgtagttaattaaactcaacccttgggcaaatgatgggtgccgcaagcccatttgatctggaatgtataacttcactgggcaattaaagatttccttagccaagtcgacaatcccaggtaaagctgtcacgccaccggtcataatcaccccaccaggcatatcaaaagcgtgtactttatccaattcagctttcaaacgatcaaaaatctgcatcgtccgtgcttcaataatctcagctaattttttctctgtcacttgcactggtaaagcttgaccaacaacttcaattggaatttgttcttcttctgaagcagccaatgaatcagcattgccataatctcgtttagctttttcagcattttcaattgacgtgttcaagaccacggaaatatccttggtcatatggtcgccaccttcttgatcaatcgccgtaaattttaattgatgatcatgaatcacagcagctgtactttgaccaccgccaaggtcgacaacgattgccccaaaatcttgttccccgtctgataaggctagcttaccaagtgctaatgggttcactacgagttgtgatagtgttaaacccgctttttcaatacatttctttaaattatgaatcattgtcttgggtgcggtgaacaaaattccgttcatctcaagccgaacccccatcattccgcgtggatctttaatcccatcaaacccatcaaccgtaaacgattgcggtaagatattgaggatttcacgttcaggtggtaaattccgaaccaatgcggcactagcaacgtcttgcacatcttgaccagtaatttccttagattgatcagagaccgcaatcatcccttggcattcttcgatttgtagttggttggctggaattccagcaacaacccgattaatttcaatatttgctttttgttctgcttgttgtacggcttgttggatagcggtaaccgcttgatcaatgtccacaatcgtcccgcgacttaatccgtttgatctagctgatccgacgccaatcacgttaagttgtttattaattgattctgcaacaattaccttaattgaagtagttccgacatcaagaccgacatatatttttgaattctccattaagtgtgtggaacctccttgcattcaattagaataaaatgattcctatgctaaatagtaccacatttcgactagatttagaaagccaatccaatctttttaaacagtgttaactaattttttgttgaatcggcctcagaattatcaaataatttggcgtaagcgccaacttctaagtcaattcgtcccttaccgtccatttgtttcgccagtgtgggataatatttaattttcttggcaagtgtccgcaaatccccaacaacctcattaccatcattcatatataagtgaacttgataaggattattgttcttagctgttaaacgaatttccgacacagcactttgaatgctgtttggaaaggcttgatatagttttaacccttgctttaagaaggcgtcatttttaaattgactatagacagggctattgccgagagactgcgtcattttcgtctttaaaatcgtgccattttctaagattggataatattgtttatgccgcactagatagcccaccgtaggatattccgtaatcgccaatgtcagttgattaaactgatcaactttgacatttacacttttcaccttaggtagtttctggtgaatccgcttctcaatcgctttttcctgccagatttgtgtcaggacattatcgccaatccgtacgccactcgcattaatcacctgttgatcaggcactgatttagtcccgttgaccgtcatttgttgaacgtcgctaatgggcaacataaaatagattgccacacaagcgcccaatgtgaaggtgctcaataacgctgtcaaccgccactttgtctttgccgttcgttgcgcttttagatgtggtagttgaccactaatcgttggtctccccggcgttaaccgttgccgacgttgtttcttccaacgctttagttgataagcgcgccaaacgtttagtaattggagcggatcgagcgacccatttttagttgtttttttcttcaagtcatccgcccccttcttaacttagatgatagtattaatcacttcaataatgcgatctgaagcgtctggaatccccattttcttagctgctttagccattgcttgttgactatcaggggttgcaaaaagcgtatctaatgattggactaatttgtcacccgttaattgtgcttctggaattaaaatcgctgcgtcttctttaaccaaactctcggcattttttgtttgatgatcatttgttacataggggcttggaatcaaaattgacggaatcccaagtgctgtgatttccgccaaactcgtcgcaccagcacgaccaacaatggcctttaaatctggtaaaatttcgggcatgtcgttgatatatggtacaacagccaaattatcattgagcgtcatcgcctttaattgcgcttgaacgtcatcaaaatgaacccgtccagaaacgaatagcacctgatactcttttgtattaagtgctggtactgcatcgataaaagcttggttaatacttggtgcaccacggctcccaccaaacacaagcactgtcggactgtcagtcttaagcccgaattcacttaaacgttcgtttggtaacattccagcaacttgttgggcccgcggattgcctgttaatacaattttgtgcattgggaattggtcgctgactgattcaaaggaaatggcaactttatcgacaaagcgcgccaaaaagcggttggtaaccccggctgctgagttttgttcatgaatcaacgttggcacttttaagcgacttgctgcatacagcaatgccccagaaacatagccacccgttccaatcacaatatcaggtttgaatgttttaatcatttcttttgcctctttaacactgcgcaagaaaagttgaattgttttaatatttgttttaatgcccttcatattcatcgaacgtttaaatccttggatttctaacgtcttaaaatcgatgccttgatctggcacaattttactttccaaaccgcgtttagtcccaacatataaaacggcatccaacaagtcgcgttgttgcattctttcaattagggctaacgctggatagatgtggccaccagttccgccaccagatatcattactctcattttagaatctccaatttaatctgtaatttgttcgactgccttaataaagacgtccccacgttcttcaaacgtcttgaactgatcccagctcgcacatgcaggcgacaataaaaccacgtcgccggcttcactagcagcataagcttcaggcactgcttctgttaaattatcaactattttgatgacgggaatacctgcttcgcgtgctgtctgtgccaataattgtttggtttcaccatataagatgattgcttttacgtgttcttttagtagtggtaataatggttcgaaagtaaagccccggtcaagaccacccgctaataaaacaattggttgtttaaaactcttcaacgcgacttcggtagcttccatattggttgctttagagtcgttatagaagcggcgaccttcatagctcgtcacaaactgcatccggtgtttaacgccggtaaaggtcgttaaaacatcaatgatcgcatcgtttgattggcccatcagcttagccgccgcaattgcggccaaagcattttcaatattgtggtcaccaggaacgttaatatcagtcactggcattatcacttcacccttaaaacaaagttggccatctttgacataggcgccagcttcagagttgcctagccgtgaaaatggcacaacttgcgccttagtttggcgactcaattcacgtagttcaggtaagtcccagttgacaacaaaaaagtcgtcagccgtttggttttgaacaagtcgcattttcgcagccacgtaattcgcacgcgagccatgataatccaaatgtgcttcataaatattcgttaaaactgcaatcttaggtttaacggttgttgtaccgagtagttggaaacttgataattctgtgaccatcacatcggcagccgtcactttttgggcgaccgcacttagtggaatgccgatattgcccgcagcgtatgcgtgcccctgggtgcgattttcatctaacatcaacgtaattaacgttgtggtagtcgtcttcccgtttgaaccagtcacactgacccattgggcttcagacacttcgtacgcaagttctggttccgttaaaactggaatcttacgcgcaatcgcttctgccaccattgggttatcgtaacgaatgcccggatttttgaagaggtatgcaaagttgcgctcaaataacgccaatggatgcgatccagtaatgacggttgcccctaattcacgcaattgtgcaacttgaggattgtcttcttgttcctttccgtcattgacggtcacaatcgcccctaattttaataacaatttagcagcattaaagccgctcttccctaatcccaaaactaaaactgcctgatcttgatacgtcgtgctggccttcattaaattcgccctcttctaaaaaattaacagataaattgctgaacagatgatactaaataaccaaaagctgatatcaatccgccattcactccaccctgacatttcgaagtgatgatgaatgggactcattttaaaaatccgcttatggaataacttaaatgaaccgacttgtaacatcacacttgctgtttcaatgacgtatactaacccgaccaatagcagtgagaactctcgatgtaataaaattgacatggctgctagtgcgccaccaagtgctagtgaaccaacatcacccatgaaaatttgcgctggttttttattgtagattaaaaagccaagcaatccgccaataatgctgaggccgaaaatggcgacatcaatttggttttgatgaaaggcgataattgtataagttgcaaatgagatggttgccaagccagcaactaacccatcaatgccatccgttaagttcaccgcatttgagaaaccgactaaccacactaagacgaatatacaaaagaaccagttacttgaaatagtgccaattactgggatttcaagtgcagtactgaagccttcatggaaataaacagcgatgaagacaatcccaccaataatttgccctaacaatttttgccaagcgcgtaagcctaagttctgtttacggaaaactttaataaaatcatctgaaaaaccgagaataccgtataacaccagaataaacatggcaattaatagactattcgttaactgttttaagaataatcctacccaaatacttgaaacaacagcggcaataatgaataagagcccgcccattgttggtgtcccatttttcttagcgtgccatttggggccttcttcacggattgtctgcccctcttttttaaagcgtaaatacccgataaaaagcggcataaaaatcaccgtaattacaaacccactcattaagggcactaaaaattgtcctgctgccatttcataaactcctttaatccaactatcttattttaattgtacttttatttttttaaccccatctagcaacccattgaccgctaggctttgatgataagcatatccgctacctttgatgtcaatctcaacacctgttaattgcgcgagcttcaagaggtcatttttcgaccaacccgtgacatctggcatcgtcattgccccattggtcattaaaatgactcgctgtttaggtaaaatcacactattggcctttggtaattgctggacgactaagttcccactaccaacagaagcggtttgtaggcctaaatccgttaatttcttttgtgcttcatccgttgattgaccaatcacagacggaactgttacttgttgttgtgtgtctttttcagcctttttggtatactccagtgcccgtttcatcattggattgaagacctgtgccaaaatactttcagcactatctgtcatattctgcggctgtttcattgtgacatataaaatatacttaggatcatcagctggtgcaatccctgatacagagaagatataattgcttgcgccggttaaatagccaccgtctagaccagtaatttgtgcggtcccggttttaacggctactttataatctggaatttggtaaacctgacccgtcccataatcttgataaacaacatcttccatattttgtaagacagatttggccgtgctagccttaattggtttaccagctttgattggttttacttgatgatcctgattaatcccagataaaatctgcggtctaatcattgtgccatcgttcgcaatcgcacttgtcatctgcagcatctgcattacattaacgttaatcccttgaccaaacgaagttgtggcctgatctagtggccgaacatattgcaatgtcccctctgtttcgccgggtaattgaataccagttggttttaagaagccaaacttctgaatgtagtctttccaaaccttaggacccatggcttgttcaagcttgaccatcccaacgttacttgatcgtgcaaaggcttgactcagcggaatcatcccccagccactcgtttgccaatcgctaattttcttatcgccaactccaatcgaaccggattgataatactgattaggattgtaattaccagagtcgatggcagctgccaaggttgcaattttcaaaacagagcctggttcatagccatcttcaactaatgtatctcgccaaatcttgccaattccctttttagtgctggcattaaaggttggtcgttgtgaagccgccaaaatttcacccgttttagcattcatcaagacggcattcatactcttaggcttatattttttattgacgctcgttaataaagtttccatgtatgattgtaaccgagaatctaaggtcaagtaaatatcttggccgtttttagcggcttttactttgtttttcttttgattgatcgtgtatccataggaatcacgggcaaaattcttgtaaccatcttggcctgctaattgtttgttgaagtatttttcaatccccattacaccaacgaggctttgatcagcgccgtcttcgtcctttggtgattgagcgataccaatgacgtgagatgcgaatgttccattagggtacagccgcgtaggggactcattgaagtaaataccggttaaatgttctttttcaatcttccgtttgatgctcagtgaaaggttttggccggcacttccgaattcaacttgataaactgaacggttagctggcgttaattgtttatagattttttcttcactcaatggtagatagcgactcaaaactttcgctgtttttttcttatcagttacatataacggcttcttattagggccaacgtaatcgtgacttaataccgcatacactgaataggcgttaatgtcttgtgccaaaacgttccctaaagaatcataaattgtaccgcgttgtgcgcgaatcacggaatcagctttgtattttttctgtgatcgtttcgttaaatccacccctgcaatatgcccagtagcagcaatgtaagcaaaacgaccggcgaaaactagaaaaatcgccgcgataattagcaataaaagcctgccaaaaacgcgtcgattccgccgtggactcttacgtgtcttaactgatttcatttagacacgttccgaatattattttcatttagtttaagatcatgtttctgggcaaaagcattcagacggtcagagcttgttaattcaccgatctcctgttttaaatcattattgttagcgctgacttgggccatcttttgagtcgtactttctaatcctcgttgtgcattaacaactgcaattttggtggttaacaaactaaccaacatcgcgaaaaagataattccaataactgacgtcgctaatttttcaacagctgaaaaagccacttttttagactggcttgcaactgcttgtttatgtacagtaggctgcgtttttagcggtgctactggcgtttctaattggcgtgccgtgttagttgccatcatcatcaatccttctagtcaatttctttttgtttttctgcgacacgtagcttagcgctatgtgcacgatggttttcttctaattcatcatctgttggtagaatcggcttgcggttcactaattttagaaccgttttttgttcttctggtaaaattggtaaccctttcggtaaatctgggagcgttgcttgttccttaaacatcgtcttcaccaaacgatcttctaacgattggaacgtaatgacactgatccgcccgccgacattgaccaatggaatagcttgttcgagtgaatcttcaattgcccctaattcatcattgaccgcaatccgaatcgcttggaaaatccgcttcgctggatgtccaccctttcgtcttgccggtgcaggaattgcttctttaatcaaatcagctaattcgattgtcgtttcaatcggcgcaactgctctttgttgttcaatcttccgcgcaacttgttttgagaacttttcttcgccgtagcggaaaaagatcttaattagttgttgataggtccactcattaacgacattgtaggcactgagttcagccccttggtccattcgcatatcaagtggggcttctttcttataactaaacccgcgttgggcatcatcaaattgtggtgatgatacgcctaaatcgtataaaataccatcaatcttagtcacaccgtgttctgctaacgctgcttttaaatagcggaagttactcttaataaaagtcacttggcccgcttcagcatatttggctaatcgttgtttactacttgctaaggcatgatcgtcttggtcaaacgaataaagatgaccggtcgtcagctgagataacaaatattcactatggccgccgccccctaatgttgcgtctacataaacgccatcgggttgcacattcaaggcatcaaccgtttctttcaataaaacactttgatgtttaaatgtttctgtcatctatttaccatccttctaaaaatcaaaatctaacatattttctgcaatatcatcaaaattctcttcagcttcttcgctaaagctcgcccatttttcctggctccaaatttcaatgcggtttgagaccccgattaacacacattctttttcaagaccagcatgtttagcaagtgtgtctgagatattcacccggccttgcttatcaggggaacattcgaccgccgctgagtagaaaaagcggacgaacgcgcgggcatcttttttagcgagaggcagtttttttaacttctcttccaactgttcccattcactaagggggtaaccaaaaatacaattgtccatgccacgggtgagtacaaattccgcacctaatgatttacgaaatttagccggcatgattaaccgacctttcgtatcaatcgtgtgatgaaattcgcccatgaacataaccattcacccctttgcccaccttaactgattttagtctaccacaatcccccactttctaccacattttgccaaaaaaaaccaaaatcttatcattttggaaccaattgtgcacgatatttatatcactagcctttttggccaaaaaaaaacagccatttcgttaaccgaaatggccgttttacttgttaattaagtaagcttattttgggctgtcgcaccacgtctaagcaacgccgcaaaaaattgctcactttaatctaatttttagaagtttaaaatgccagttgcagcgagtgaaccaaaaatgactgagcccactgtggcgattaacattacccaaacgaaaattttagtaatgcgactaaacgtgcttgtttgtttcttcaattattccaccacctagacttttttcttatcagcagtttacaccgaatcacttgaaagtgcaactcagtcctttttatcttttccaaaagacggtacaatgggactattaactttcgaggtgatttaaatgccatttagcacaacacttttctttgcaggcttaccgcccgtctgtgtcgcactcggctactgtatcgaccggttgactcagcgtctatttaaacatcgttttcattatattaattggctaccaattccattgctagtaagtgctatctttctgagtatgcctattttcagtaaagctggctggttcttttgcttagcaatctgtctgtggggaatcatctggagcttaacgcgcttttactacgaccgtgcgctatacctacgtaagtttctacggagttggtggcgctttgtcctcgtgatggccacagcatggtacctatcctttctaatcatcacactcctttaaaccaaaaaaacggtgtcgactctttcaatttgtcgacaccgctttttttagtttaaaaaatatttccctaacgcgcttaattgcgtaattgtgattgtcggttgcaccgtgattggtaatcgatcaacatcgaaataggccgtcgccacatgggcgttaatccctgcttcaatatctaatgcacgatcaccaatcatcacggttttagttttatccagctgataacgatcacataaatcgttcaaactatctggcgccggtttcctggcaaatccgctctgactcgtaacaatttcagtaaaataatccgctagtccatgcgctgccaaaaatttttctgcagcatcatcccgatgggtcaataagaaattctgaccatgcgcactaatctgtttcaaaatcgccgctgcccccggataaggttgcggcgtctgttgtaattggtgttctaattcatgatattctcgatccaattgttcaaatgaaacattagtttgctgagcaagcatctgcagttcccgtttaattgaagtctgcttaatcgcttggtataagcgcgattgatcgactgcgacttgatgatcacggtaaacctgactgagcgccgtcatcataacaggataagtatcatacaatgtaccatcgaaatcccaaatcgcattttgataactcattaattatccattctcctttgtatcaaataggatagtgactggaccgtcattgaccaaagccacttgcatatcggctccaaattctccagttgcgacgcgaatcccagtcgctgctaatttttgattaaactgttcgtataagcgtttagcatagtccggtttcccagccgcagtaaagcttgggcgattgcccttcttagtgctagcaaaaagggtgaattgtgacaccgataaaatggcaccgtcaacttgggccaacgccaaattcatcttgccatctgggtcttcaaaaacgcgcaattgactaattttcttaaccaagtaatctaaatcagcttcagtatcatcatcacaaataccgaccaataacaaaaaaccttggttaatcttgccaacaatcgtctgatcaatcgtgacacttgcttggctcactcgctgtagtactactcgcatattaagtcgctcctatccttgaacccgtttgacttcgtaaacatctgggatgttcttcacggcttccataatcgtttctaaatgatctgtattgcgaatgccgactgtcacatgaatatctgccatcttatcgtgatcaatccgccccatcacgttatttagctgtttcgtatgtgcatttaaagactgtaagacatcgttcaatagtccaccacggttatagccgtagatttccaaattcgcctcatagagttgatcattcttagcgttggtattttcccaactgacttcagtcaatcgactgttcatatctgcccgatcaacgatattcggacaatcgcgccgatgaacagaaaccccacgtccctttgttacatagccaacgatatcatcgccagggactggattacagcatttactcaagcgcactaagacattgtcgacaccttcaataacaacgccgtcttcatgtttgattgtaatatggctaccgtttgctttaggccctggttgttgtgaatccttcgctgataaaatctcagcttctaatgctttttgttcactttcttcttttgcccgtcgttctttaatcgttaagcgattgacgactgactgtggtgagatttcaccgaacccaattgctgcaaatagttcttcttcggcattaaaattaaaatgcggtaggatgacagctatctcggctttagtaaggtgttcctttggtgtataaccatcttctaccaacagatgttcaacagccgtccgtcctttttcgacgttttcatcccgatcttcttttttaaagtagcgcttaaccttattccgagcacgcgcggtgaaggcgagcttaatccaatcacgacttggtgtcgcacttgttgacgtcaacatctcgacaatatcaccattacgtaattgatagttcaacggtacaattttgccgttaatcttagccccaacagcgtggttcccgacttcagtatgcactaaataagcaaaatccagtggcactgaaccttttggtagttcataaacatcgcctttgggtgtgaaaacataaacgcgatcgctaaagatatcgcctttgacgctttccataaattctgcagcatcatcggaagcatcttgaatttcaagaatttcacggaataaatcgagtttacgccctgattcatccagcttaatctgttccttaacgccttctttatacgcccaatgtgcagcgaccccatattcagcaacatcgtgcatttcttgcgtccgaatttgcacttcaagcggtttgcctttgggaccaatcacagttgtatggatcgattgatacatgttggcctttggcatcgcaatgtagtctttaaaccgaccgggcatcggtttccacttagtatggattgctcctaaaacagcatagcagtccttgattgagtcaacaacaacccgaattgcgagtaaatcatacaattcttcaaattgtttatgctggtcgcgcatcttacgataaatcgagtaaagatgctttggtcgtccataaatgtcgtaattcatatctaaatcagcaattgagtctttaatgtcttcaattgcttcttgaatataagattcgcgttgtgtccgcttagaattcatcaggtgcacaatccgatagtactgttgtgggttcaaataacggagcgagatatcttccaattcccacttaatcttactaatccctaaccggtcagccaatggtgcatagatttccaatgtttcgttagcaattcggcgttgtttttcgggtttcaaatgtttcaacgtccgcatattatgcaagcgatcggcgagtttgaccataatcacccgcaagtctttagccattgctaataacatcttccggtgattttcagccagttgttcttggtgtgatttatatttaatttttcctaatttcgtgacaccatcaacgattaccgcaacatctttgccaaacatctcttcaacatcacctaacgtgatattcgtatcttcgacaacatcgtgtaagtaaccagaagcaaccgtagcgggatccatcttcaattcagcaagaatccctgcaacttgaattggatgaataatatacggttcacctgattggcgaacttgttctttatgcacataagctgcaaaatcatacgctttttggacaaaagcaagatgctcagtattcatgtatttctgacataactgtagcacttcctgctgtgaaattactttttcttctggcatcctgcctcactccaattcctcttactcgattaaaaatgtactgaatacaacaaaactgactcaactaattaactgtcgagtcagtttgcttaacggcgttcatacgcagtattaattcctaagtaacttaataaacaataaataggaacgaaccaatagttataatctgcgtagcgcacaaccaccatcaatccaaataaaatcggcaggtacaaaatgtgataccaagctgcatgggtcttttgaacgcgatacccaatcataaaggctgcgcaaccattgacagccatgaatagcagtccaatccgccacgttttatcgatgtgcaagacaccaaacactagcggtaaaacgaccgccaagagaatggccactaataaatagcgtacccaatccatttttaaataacgattattcataaatttagtcatgttgtgcccctctgtaaaaagattacatctatcatactataaagtagccaattctgtcacatacgaaatcgcacttaacagatataacggcgcggtctcggcccgtaaaatccgtggtcctaaaccagccatcttaaagccagccgccgcaagcatctcaatttccttgggcgcaacgccgccttctggaccaaaaacacaaagtaatcgatccccaggttgggctgtttgtaagctctgaactaattgggcatgctcaccgtctttagctgactcttcgtaagccactaatttaatcgtcgctgattcttgtgcgaccgccgttaaactgttgcgccattcaatagttggtacatgcgtccggtgagcttgttcggctgcttcttgcgcaattttttgaagccgcgcaactttcttagcttgttttttatcatcccagcgtgcgactgagaattggctattacagaaaataaaccggtgtgcacccaactgcgtgcctttttgaacaatccagtctgttttgtcaccctttgacaagccgcatacaatcgtcgtctcaatcggtaattcaactgattttgtaattggcgattgcaccgtaacggtgactgttttgtcagttgcatccagttcagttaattcaccgatgaatgcttgttcatccggcgttaccaattcaacacgatgaccaggctgcatccgcatcacttttagcatatgatgtgcagtttcacccgttaaggtcacttgttgttctacttgaattgcttcatcaataaaataacgttgcatgccatactcctcttaatcgtcgtccgtcttttggcgtgtaattaatgccacccagtcacccatatgaagggcttcttgaacaacaaaatcattcaccgctaacgtttcacggacaagtgcttctttatctgcaataatgccggccagtaataggtgtccattgtcattcaataaagccttggcttggggaatcaagggcacgataatctctgctaaaatattggccacaatcacatccgctttcgttgtaatcccgttcaacaaatcgttgggatgggcatcaatgccagcggtcactgggttgagggcaaaattttccttagcggcatcaaccgcaacttgatccacatcataggcgcgaatatcattgactcctaaatgcgcagccgcaatactcaaaaccccagaaccagtcccgacgtcaattaaagattcaccgccgcgtaaaaccatttctaacatttgtacggatagatgggttgttggatgcgttcctgttccaaaagccatccccggatccatccgaatcagtgcttcgcgttcatcagtcggttgatagtcggtccaacttggcacaaccgttaaaaagcgagttagccgcgttggttgataatatttcttccaagctgtcgcccaatcatcatcggcgacttgtgccaatgtcactttaccagaaccaatcgctaacccaaagtcagtcaattgggcaacgcgttgttcaatcaacggtaatttttccggcacaaaaactgtttctgggaaaaaggcactcactgcagcacccgtttcaaggtggggaatactgtctagatcaataatttgatctggctttgcctttaaatgttcataatcggctgcgtcttcgatttggattccttccgcaccattttccgttaaaatattggcgattgcttccactgcttcattaacagtagcgaccgttacttttgtccattccatgtagcatgtctccttcttaatgcgggttgcttagtatttagggtaagcgtagtatttcttcgctaattgatcatctgcttgagcgacagttgcttggaaaacagtgtcatcccagtttaagataaaggtttcttcgtctgattcatcattcacaaaagcggctaattgatcttcgccttcatctaataagtcttgtaaatagttgaaaaagccccgaccgacttgtgcgtttaaccccttgcgaccagcaaatggaatcactgctaaataattgtctgcatattcaaagccgtccatcttactttcatcgaagaataaaatcgcatcttcataactgatttcatccgattcgttcaattcaccattttgatcttcaacggcaattgcttgttccttagtcacgtttaatgtgaattccaattcaatcgcccgagcttgtttgtcccagttgatattcatatccccactaaattgtaaatcatctaattctgcatcgaaaaatgctaacatatccatttcagccactgtattcaccatatccttttaattagtcgttatttaagtcaattttaaagttgaacgtattaacatcatacctgattatgacttgaatctaaagcaatcattcaaaaaagcccagaacaaaatgtcccagactttcaatcgtaattctacttaatgtgctgcttggttctgaccccaataaataacgtccatactctgatcgtcataacgttggaactcaattccgagtgctgcatcagattctgccatcacacgaccatatagccgcatatcagcttctggcgtgttgccatctgggcgaatggcatgcatcaacataaacttagccatttctgattgtagatgggcttcaatcggggccaacggatcaaaaaccatcgtgacaaaccgaatatcactactatcgccatcaccaattaattcaacaatcggaaacccaccaaaattttgttgttgttttaaataagccaataactggtcaatctgttcttttgtgaaggctgatttataaaagagaaaatgccaagtttgtcgtttcatcgtgtcacccacccgttatttattacatatagtatgccatactgtcaccaacaacgcgaacttagtctttttttggtaattgattcgattttggttggtgatatgtctttttcaagccagcaaatgtcgcttgaatcttttggtaatgcatttcatcgttacgcgcatgcttcaccaactgggtaaaatcgtgggactgtaagtccttttctgtttgttttttaaaccacaacatatcatcactccttatgtaattttattatacaacgaaacgttatcatcgcagtcttaaatttacttttaaaccaaattgccgtaaactaacactattcattaaaggagtctattatgggaaagaagaaaaagcaaaacgcattatccaaaacattagttgaaaaaattctagataaacaaaaagtggcctacacccaacttgaattcccaacagaggaagtccacaacgttgcccaaatgaaggtcgatcatctcgatatcgatgaacatcttatttataaaacattggtgctctctggtaagagtaccggcccaatcgtcggtgtcgtcccgattgattgtcatttagacgaaaaaaaattaagccaaatttctggcaacaaaaaaattgcgatggtcccattaagggagctcgtggccactactggctacgaacatggcgctaacacgcccgttggaatctgggaacaatcccactatccgatttacattgaccaacaggctgaaaaggaaccattcatctatgtctcatccggtaaaattggccgctcaattcagattaatccgcaagacttacagcgggtcactgaagccacctttgctgacatcagtgaagcctaaaaatatgataagaggggctagaacaattcacttgttctagcccctcttatttttgagtttaatctaagtattgggccaaattagcaccagaaatgatgacttgttccttcagcaaatttggttctttaataatattatgaaccaccgtttcgggtaaaacatcattttgtgcgagcatttgcagagcatcgtcttgcatcacgacttttttaaccatattatgtattttaatcgttgcaacatatttttgcgattcccgttcttcaaccacttcgtagttgccgtaataatgtttatctgtcattaactcatccccttaaggttaataatatcatatttcaacaaataaaactaagtaacttatcctataataaggggaaactgttaaaaaataccaaaaaaaaagcaaaacaataactgttttgctttttccattatagtaaggagagtacaggattatattaggactatattttaccgtagtaccagtatttctgtactcttctgggacaatattgggacaatagaatttaaaaatttaaatataatgtatttgctttaccagtctttttatcatgaataaaggccgtgtgtttaacagaaccgtctggattatagacatctgatttttttaaggtcatgacatcactcacccgcagtagggtggctttaccaacttgaaagatggtgtagttacgccgacccgcccaaaaactatctagtagaggcccctctaatccacaagattagagggctttttttgttggagtggataggtgggagatttttgaaaaattctgttataatggcggtaataaattaggacggaaggtgagttgcatggatgacaaagataaattagaacttgaaattgcacgccttaagatggaaaatgagaatttacggttgaaagctgaggttgaacagcggaagaataataagtactggttgtgggcattagtgccaattgtcgcgattcttgctggcaacatgacctcattttcacgtatgttcatgcatttttgtagatagttcacgatagattgcatagaaataggcgttaagcagattatgaaaactgcttaacgcctattttttattggcgactgtgacggtagccgtaactgaagtaaattgttaggccaatcaccaaccagattaagaagacaatccaagttgttagttgtaactgggtcatgagtagtaagcataagccgcatgaaagtaaaggaatccatgggaatagtggcactttaaacccttgtggcaattcattataaaatggtaacttgcgcaggaagatcacaccgagagaaacagttgcaaaggcgaataacgtgccaatgttgaccaattcagcaatcttatcaagtggcactaccattgcgacgatgcttgtgacgatggcgaaaatccatgtattcgcaactggcacatgtgtttttgaactgactttggcaaaaacgggtggcaatagcccatcgcgactaatggcgaagatcagacgtgttccgccgtaggtcataacgagtaggacagttgtcataccggcaactgctcccagggcaacaatcccagcaacccagttttgatgcatcaattgaagcgcaaaagcaacggggtcaccaacgttgagttttgtatagtgcacgacgccaacgaggacggtggcaactgcggcatacaataatgaagcaatcaataatgaagcgataatcccgattggcatatcacgttgcggattgacaacttcttctgatgcggttgaaacggcatcaaagccgatgtaggcgtaaaatgctaatgctgccccagaaagaatgccaccagcaccaaatggtaagaacggtttgaagttggctggtttcacatagaaaatggcaacgccaaggaaaattacgatgacagcgactttcacaccaaccataatcgtattaatccgtgttgattcgcgtaagccatttgatagtaagaacccaatcaataacgtaattaaaccggcaattaaattaataccaccagggtggccaggcgtccatgcagtcgataagaaggtaggtaagtgtaatccaaagccagcaattagattttggaagtaggctgaccaactgacggccactgaggcgactgcgaagagatattcggaaataagtgcccaacctagaatccacgcgattaattcaccgaagacggtgtagacgtatgtgtaggcactaccggccaagggaattgtagaagcgaattctgaataacaaagggcagccattgcgcagacgactgcagcgagcaggtaagacagcatcgcaccgggtccagcatatttagcggcgataatccctggtgtgataaaaataccggcgccgacgactgcaccaacccccatggcggttaaaccaaaggcggttaaatggcgttctagtgtactatttttaaattggttcacgtcgatttgttttttggcaaagagtgaatgttgtgtcattagtaactcctttttaagtgatatgattctaattttaatcggtctactgagaagcgtcaagataaaaaaagcgccatgacagtgattgagccgttatggcgcggattagttaagtgattaaattaagccccagtggcgtaaaccttcaataatgccaccttcagtattcttagaagtaatgtattttgccttggctttagcttccggaataccattgcccataacggtgggatagtctacgaagtcgagcattggtaagtcgtttgtaccatcgccaaacgcataagttgggatgcccattaagttttgtgagcgaatcaattctttaataccggtttgttttgaacaatctttttcaaccgtatcaattgagttcggtgtgttgcggtagaatgttaagtcggtacttagtgtttctgtataggccttgtcattgtcgtttgtgagaatcaacatcatgtagactgaatgattcaagtaatagtctggatcaacttcggggacgggggcgttgacaaacttgtaggcatctttgccgggttgagttacagccgtaatccggattgcttcttcattataaaaagcgatggcttcgtcagcagcattagcaattgcgacggttttttcaatcacgggcgttggaatagtgcctttataaacaggttgaccttcatattgaatgaagctcccatttaaacaaatgaatgaatcgatgccggtttttgcaagtgcatcttgaatttcaagcggtgagcgaccggtcgcaatgattggtaggtagttgttggcgcgtaattggtggagtgcaatcgcaacagctgcatctacttcagaatgttcgttgtaaagtgtaccgtcaagatcgaaaaatactagtcctttataagtcaaaatggggcctcctaaataatgatatctgcttaacatgctatcatgcttagcgataccatgcaaacgggaaccgtgatgcgtttgattttcatcacttcttcatatattattcatccgtaattggtttatctactgtataatatagacatagcaacgtaaaaagagaaggaattctaatgaaaattttaatggtagaagataacaaatccgtatcagaaatgatgagtatgtttttccaaaaagaagcttgggatgcccatttcgcttacgacggcaatgaagcagtggaagcctttagtgtcgatccagagagttgggacattatcacgcttgatttaaatttaccgggtttagacggaatgcaagtcgcccaaaaaatccgcgagttgtcgaagacagtaccaattattatgttgacggcgcgcgattctgaaagtgatcaagtgcttggccttgaactcggtgctgatgattatgtgacaaaaccctttagtccaatcacactgattgcacggattaaagccttacatcgccgtgctgagttgattgatgaacaagtcgaagcagctgaagaaaacttacaacaagcggctgaaaattcagattttgatgtacaaacaacacactttaagttgagttctaaaacgcgtgagacttatttattggacaaaccaattttagatttaacgccaaaagaattcgatttattgaagacgttagctaaaaatccccgtcaagttttctcacgggaacaattattagaacttgtgtgggattaccaatacttcggtgacgaacgaacagttgatgcgcatatcaagaagttacgtcaaaagattgaaaaagtaggaccacaagtgattcagaccgtttggggtgtcggttataaatttgatgattcagacgcagcgcgcgaatgaagcttatttatcaatggatgttggcatttttcggcgtcattatgacgaccattattattgtggggattgcgtttacgcaatattcgacaaggaccgcttatgagagcacctgggatcaactagaaggttacgcggatgtgattgaacgtgaagctttcaaacaggggtctcaagcggccttgtcgacccaattcattattgatagtcaacaaatcctttcccaacaacacgttgggtttaatttctttaacgccgaaaacgagatggtgtatcctaccccggatcctaaagtttcggtcaagaaacaatattggaaacatttaaagaatggccagattcaacggctgagcttaagtcgtgattcgcaccaagtgaataacaataagcaagaacagttagtggtcttcaaacccgttttttacaataacaaactgatttacgtgattggggtggcagcaccactacaaaccgttaaatctggtttgacaacgatgcgcaagaacctcttgattgcctttttactatcgacaatcggtgggattctgttgagttacgtcttagcacggtatcaaatttgtcggattaatcgcttacgaaatgcgacccacctagttgctgaaggagattttaatgttcagattaagaatcctggtaaagatgaattggatgatttggccaccgattttaatgagatggtgcattcgttgaatgaatctgaagaggaaattaagcggcaagaagatcgccggcggcaattcatggccgacgctgctcacgaaatgcggacgcctttaacgaccgttaagggtctgttagaagggttgcaatatgatgcgattccagaagagatgcgcgccaagagtatttcattaatgcaaaatgaaaccaaccgactcattcgcttagtcaacgagaacctggattatgaaaagattcggactaaccaaattaaattgaacccgcaaacgtttaatgcggtggaagctatccagaatattcaagagcaactcgagaagaaggcgactgaagccggtgatacgctcatcttggacgcccaagagaatgtcccaatctatgccgactatgaccgttttgtccaagtgatgtttaacatcatgcaaaatgccattcagtttacagaaaatgggcaaattacggtgactgcggaagctggtttccacgaaacaatcttaacgattagcgataccggtatcggaatgacggacgaacaagtcaaaaatatttgggaacggtattacaaagcagatccatcacgtaagaataccaaatatggtgaatctggtttagggttggcgattgtccaccaactcgtccagttacattatgggacgattgaggtccaaagtattcctgaacaagggaccacttttaccttaactttcccagatgaaacgattgtgacaagtgaaagctaaaccaatttaaataggcgtcacgacaaggattaaattgtcgtgacgcctattttttagattaaatatgcaattgcgtttgagctggttgggtttcactgatgatttcgccagcgtgcattgagagggtaacagcggcgcgcttgttgagagcctcgtagaagttgtcgctatccattagaatcaggtgggcgggtttacccacttcgagaccatattggtcaaggacgtgcattgcacgagcaccattgtaagtaatgaagcgataggcattcatgatttcagtatggcccatgatttgggttgccagtaggccactatacaacacatcaagcatgttgccatcgcccattgggtaccatggatcttgaatatcatcttcaccaaaagcgacgtttagcccgttggcagtcagttcttttacgcgcgtcaaaccacggcgcttcggataagtgtcaaaacggccaccgagaaataggttgacaagtgggttggcgatgaagtttaaatccgccatttttaacagccgcatcaatttgtacatataggcatcgttgtaacagcccatggcagttgtgtgtgaagccgtcactttgtctttcatccccgtttcaagggcgagagtcgcgactgtttcaagactacgtgaattgggatcatcaatttcatcggtatgtgcgtcgaatagtaaatcatattcttgagcgagttcaaaagcaaacttcaaggattcgacggcatattcgcgattaaattcgaaatgtggaatagcaccgattgcatcaacccctaattgggcagctttggtcattaatgctttgccatttggaaaagaaagaatcccttcttgaggaaaggctaccagttgcaacgtcatccaatccttgacttcttcgcgaacctcgattaaggctttgagcgcaactaagtctggatcagtcacgtcaacgtgtgagcggacgaattgaatcccatggctggcttgtaatttcagtgcttgaattgcgcggtgtttgacgtcgtcgtgggttaaatcctttttgcgttcggaccaaatccgaatgccatcaaacaaggttccagattcattccattcaggctggccggcggtgagagttgaatcgagatggacgtgaggatcaacaaatggcggtaatgccaattgaccatgtccgtcgatgacttgctcattaggatgcggtattagctgtgcctcaattgctgtaatgatcccgttttcaattctgattgactgcaatgattcttgattctcaatgtgcacgttttgaatgagcattttatccaacctcgctttttttattagtgagtataacaatcatgagttgactttggcaagtaagtttaatacaatgcttataaatataaatccttttaagggcagtccagtgaggctgacaaaggagcggttaacaagtacattagtggacctgctctgtctaggagtaggtctttttttaatgcaattaaccaagtggagggtatcaaaatgacaaagcaacaaacaattcatgcagtatccaaggacgcacgaacgatgggcagttgggatttgttcgcaacttggattggtgcaaatgcgaataacggcacttggtttatcggcggcattattgcggcaactggcttgattcaagggtctacgttgttactagttgttggctgtttatcgtacgtcttgcttgcactggcctcctacatggggtatcaaactggtgtgggggcgatggggctaacgcgggcctcatttggcgtgaagggatccgtcttgccatcgattatcaatgtggtacaattcatcggttgggctgcggtgaatacgtatattgcagcaacttcagtgagcttcatcatcaaggaaatcatgggctggtcaggcaacgatgcagccactaaccggatgagcttgattgttgggattctaattatgtctgtcctgcatttaatcagtatttcgctcggtgaaaaatccgtccgctggattgaacgaattggcatcatcttagtgattatcttagtcacttgggaatcaatcattgtcttcaaaatggtaccgttcaaagacttagtggcgtggcgaccagccagcaacttgcggcttgaatttgggaaggcggtcgatatcctagcagcgtttaaccttgcatgggtaaccgctgctgcggacttcagtcgtttttcaaagaacaagaaagcagccacaggctattcattcttaggcgccaatattggcctgttctggtttgctttcatcgggttaacggcgacaattgccacagcgattacgttaaatcattttgacccgaacaacgcggatccaagcaccattgcggccaaattagggttaggtgttttagcgttattagtgatcgtgattaccagtacgacagctaatgcggtgaatctaatggctgcgggatcggctttaaccaatatttttccgaaatttaaattaacgccggcattgtgggtcgtgacgttattggcaacggtgatgacctttatcccggtctatgttgcctcatttttaaccactttcgaaaccttccttgatagtattgggatgttcttaggacctgaaatcgcagttttcttggtggattacttcattattagacggcggcactacaatgttggtgcgctcaatgaagttgctggaccatactggtacaccaaaggatatcatctgacagccatgattgcatgggtcattggggtggtcagctacttggtcttaaatcaattcgcgattattcacgcttatacgggggcaacgtttatcgcaatggggctgacagcacttgtttattggttaatgattcaaagaaaagaaaagacaatttaagggaactaaaaaaacgtcttaattaaggcgttttttttaatttttaccacagagttcatataattttcatactttagttttacactatctttattaggaggtgggtcatgttcttcattaaatcaattccagctaatattcggtattatttacgccaatctttgttaatctatctcgtggattgcctctttttaggcgtcatgctgattgcgctgagcttgatcagtttagaacgacatgacctcaaccagttgaaaaagcaattagccaactttaacacaactaaagaggggactaaccccctgacacatctggttcaaagtaaagaagtcttactgggacgctatcaatttatcgcggtagtgctgactatcgttatcgcacttgtgattggtattttgacttggcaagcgtttaagaagatgcgtcaggatatcgatactttcactagtgcgaattggtcgcgacatacaattgtcaattattatacgttaacggcgctttgcttactaatcagcgcaagcgtgacagtgattttaggttggttattagtcaattcctactattggcgcggattagagctgattaatcaacagtggctacaaaagccgttgcgaccaatacaaggtccccgagcatttcaaccgttatttaaaaatcatctgactgactttagtagtcattcgttattgaatccgattttgcatgagagcaccaagcagaatttaaccaatcaagtattcgcccaactatgggcaccatttatcagtctaattgcaccagtctacattattggttggtgccaagttactcgctttaggaaaatgagaaaggcgtgattgaaatgctaaataaacaacccttagcacttggacaggtctattttagtcaaccggagatgattcagcagagccttgaatcacctgaacccccatatgtcattgattatgaggcgcctaagattctaccctttatgtccggttgggataacttgttgcttcctaaaaagcagcttgcaccaacgttaaaaatgttgattgaacagcatttaaagcgcagtcggagtttattgggcaccgaattaccgccagtcgatcagttctggattcaattgattcgcggtttagcaagctaccagcgactcgtggtggtcaagcatttcttagatgaacttccaccaacggatgctcgccaattattaaatgatgtcagagcggtagcagcgcagtttcaaattatcgtaatcatgacaacgactcaggaatccgtttttaatagttttcaatcgcaggtgattagctaacgtcaaaaaaacgcaaggacaatatatgttgtccttgcgttttttttgacgattattccgtatcgctagttgctgttgcatcagactcttttttcagggcctttgattttggcacttccgtgaggcttgattgatcacccgctaattctggagcatcggttttaaagagcccaacagtcgattgatcaccattttgcgagaataaactggttgaattagcccctaatttattttgaatatcgacaagctgttgatagccagtcagatagttataatcggcagggttcactggtttaaaaccttgtggtgtatagaaacgtaataggttcttttcgttaactgaatccgacaaactcaattcgcggttcacttgtttctgccaaacagcgacttgtttttgcaacttagctgttggttcagttacttctgtcccatcctgattattgtagatggtgccatcgagcactgtgtaatcaggggtgacaaagttatggtttcggaaagccacgacttgatcatgttgtggtgataataaatcggtgccgaattggacgtaatttttattatcaatcccgagtaagtgaagcattgttggtaacgcatcgatttcgccaccatattgtttttggataccgccttttaaaccgttcatgtgaatcatgtaaggcacacgctgcagttgggcgttatcgtagtcggtccacgtttctgggtcgcggcctagtacactgagtaaggccttattatcagaattcgaaagaccgtagtgatcaccatagaggacaatcattgaattatcatagagcccagatgctttaagataattgaagaactcttctaaggattggtcaagataatgggcggtcgcaaaatagttattgaccgctgtattatcagttgtggcacgggggaagtcaccgtctttttcgggtaatgggaatggaaaatggttggtgacggtgatgaatttcgtgtagaacggctgttgtagctgttcgagatacttaatcgattcaccgaataataatttgtccttcaagccgtattgtaagacgttatcaggatcggtgttaaagtaggaagaatcgaagaagtagttgtagccgaagttcttgtagacgttattgcggttccagaaggtgcccacattaccatggaaaacggcactcgtatagtcaccgttttgcttgaggattgatggggcagcttggaaggtgttatccgaaccaagcgttgtaaagactgagccttgtggtagaccgtagacgccggtttccatcatgttttcggcatcactggttttaccttggccaacttgatggaagaagttttcaaaacctaatgtattttgatcatgatagaggctatttaaaaatggcgttacttcgcggccttcgaacttaaagtcgattaggaattgttgaaaactctctaaatgaatgacaatgacgttcttgcccttcgcaacgcctgcgtattcagcgttcggtgcagcgtaatgctctttcataaagtcgagcaccggatctaagtcgtaactctcagcttgggcacgcacttgattattctgagtagtcttgaaagcatcgtagacggtgaaggtgtcgatgccgaggtacttaacgatgtagttccgatcaaacgtccgtgataaaatttgaggtcggctgatttcacttaagccaaggttgatgccaaataataagacggccagtgaggtaatactgaaggcccaccaccgattaaatgcgtgtttgtcgatcttgatgaccttggttaaaatcagcaaggctaagacaataatatcaatccaatacagcgcatcatgccagttcatgagggccagtgaacttttgctgagcccagccgaaacttttgaataccctaagatggtgttgatggtcatgtaatcggtgaattgccggtaatagatgacattaaaatataaaagagcggtgttggcggcatagataatcaagcccaaccaataactgagatgcggctggcgaacataaagaatgatgccgaataaaaggagcgtcgtcgcgaccggattaaagattaaaatagcaatttgtaagaagccactagctgcgaggttaaaatcggtgaagtacccgaataacgtttttagccaaaataaaaagactaacaaactcatgaagcctaatctcgtggataggaatgatttaatttttgtgagtttcaaataatgtgacatcctttcaaaaaacagaactaaaagagcgctaatgccttattttaacccgagggcggcattagcgcaaatagcagtttaaagtttaaacagaaacttaacgtttcgcgggccgcatgatggcatcgtactttggattcagttgatctggcgccaaaacatgttgataaacggcttgtaattcatggccgatttctgtaatactcttagactgcgcagtttggtagccttgagctgttaaatcgggaacggcattagtgaccatcgcttggatgagttgactgaattctgcgttagtgtgacccatgtagcagttttgttgatcggcaagccagccatggtaaaccggaatatcgcgcaccaatactttttgatgacttgcaagggcttctaagacgacaatcccttcagtctcttcataagaagggaagaaaaataagtcagcattggcatacgcgccttcgataatatcgcctttgatataaccagggaagatgacgttgtcgggatgatcctgtttgacaatccggcgaatatttgctggaatactgtacataggtacatctccaaaccagataaaggtgtattcgggtagacctttggcgatttcgacaaaatcgagaagccctttgcgtttaaagaagaggccgacgcagataatcactttttgatcaggctttaaatggaagaaattccgaaaagcagcttctttagctggtgtggcttgatacttagctaaatcaatgccgtttgaaatgggagcgatagggttggttagaccatagctttccaataatgattttgaataaggggtgggggtaattaagtggtcggcttgttgatagaggctaacgaggtaccgtttaacaaatggagcgagttgattggaaccaacaaaggagttgcgaaaatcttcttcggtcgaatgtgcatgataaatgacgggtttccccattttacgcgcctttttgatgacactgcggcttttgagtccgtatgtattgatatgtaagatatcgtaatcttgatcattcggatcaagcgtatagtcaatccccattttggttaacgcgcgtttttgatgatccaacgcccgcccaattccagatttagcgagtagtttttcactttcaaaatataatagaactttcataaaaggctcctgtttcaatttatagtaacttctattatagcatagcacagtaggcacacatcgggctaaagttgggcagtcgatacctaatagtttaagattcactttagtcgagtaattaagcgttatttattgaaaaaaaacagctataatggacttaattactcattgaataatgaacagataggttaaattagtggaataagtgaggttggttttttggtatttcttgggcgtatttatgaacaatggatcctcccttggggggaacagtataatcatttaccactcatcaaattgacggtggagagtttagataagacgattttgtattgtttggtttttattgtgtgccggttggggtacttattaatcaaacgacgcaaaatacagcttctcccagaactgaaactattgttatttgtgttttatattgccttattggtctcattaacggttttacggcatatttattatccgtggcaaatgcagctccatttgcaacgaccacttagccaaattaatttgacaccgtttgttgagactttcaagttacggcaagcgcccgcccagattgattattggtataacttctacgggaacattgcgtggtttatcccgtttggtttattgcgacggtcattgacacagcgcaaaggggattggttgattacgattattgaaggggctctgttatccctgtgtattgaatccgcccagtttgttttagggactggcatggcagatattgatgatctcatgtttaatacattaggggtgatgattggcgtcctgttatatcaagtcctacaacatgcaaagcgaaaacattaaggttatcaacggtaagaaaacgcttatcgttgatttttttactaaaaaaaacgcttttttacgtaaaatttacgtaagcgcaatcacgactgggacagttgcttacatgacggtagtgaaggttggtaacgattgaatggtgccgttttcctactagccagcggatataaaactatgtataatggattcttgtactttagagaagaagaggaatttataaatggctattttaattgcattaatccctgcacttgcatggggtagtatcgggttagtgagtggcaaacttggcgggaatgcctatcaacaaaccttaggaatgacaattggtgcgttggtttttggaatcggtacctttttagtattacaacccgctttaaacttacggattatggtaatcggtatcatttccggtttattctggagcattggtcaaggacaacagttccaatcaatgcaagcgatgggtgtttctaagacagtcccattatcaaccgggatgcaattgattgtaaacactttagcaggtgctttgttattccatgaatggaagacaacgcacgattacatcttcgggattactgcattagtgatcttaatcgctggtgccacattaacttcaatgaaggatccgaagagcagtgttgctgctaaagaagatacacaatttgcacgtggttttagagcattaatcttatcaacaatcggttatggtggttacacaatcatcgttaactggtcacacattggcgcaacatcaattgttttaccacaagcaattgggatgttcgtcggtgctgcaatttttgccggtgttggcattgggacagcagtcttcaataagaaaacagcactcaacattagtactggtttattatggggtcttgggaacttatttatgttgatttcaatgaatgatattggtctagcaattagctattcattatcacaatgtggcattattatctcaacaatcggtagtatttacctattgggtgagcaaaaaacgaaaaaagaaatggtttacgtcacacttggctgtttattagtcattgtcggtggggtcaccctcggtatgatgaagtaagcaacttactaataagtcacctagacaaattgtctgggtggcttattttgtttagagtgtgtattattctatagaaaaggcaaaagaagtgagtcagatgaagagaacaaataaaacagctgtcagttactatttattgagtgtgctagttcccatgttattaatggtggggctatatgcaatgctccaaatagtgccatttggacggcataatttattgattagtgatctcggtacccaatatatgccctttttggcagagtttaaacggcaaatggcccagatgaatttcagtacgtattcattttcgctttcactgggtggcgatatattaccgctagcggcttattatttaatcagtccttttaatttactgctcctattttggtcgaatagccagttgccagtggtggttgggtatgtcattattttgaagattggggcaatgggtttaacgatggcccattttctaaagacgcgtcagcctgaatatcatttttccgcgctaatttttgcaacagcttatagtttaagtggctttgtggcaatgaacttttataacctaatgtggttagacgctctgattttcctcccactggtcatcttaggattagaacggctatttttaaaagggcgtcctggcttatatatctggatgttggttgccactatctttaccaactattacttgggttatatgtcatgtctatttgccgttttgtatgcaattagtttgttaatcaaatggaaacaaccccaacagtcttggtggcaactagtggttcactggcggcaggctatctggcagttttgttgggcctcattgattgcggggggcacaacagcagttgtattattgccgtcgttacttggaatgttgaagactgggaaaaagacaatcgctgcaaccagtttttatccaaccccgcagtttggctgggaagttttgagccaatttcaagtcggcggcagccattatacgcaacgcttaattcatgaaccaactttatttatcagtacattagcgctgttatttgcggtctattatttctgtctaccaaccattcgacggcaagcaaagtggtcgaacggctttttaattgttagtttagcgttaagtttctgggtaacgacatttaatacgatgtggcacatgttccagcaaccagaagggtttccatatcggaatacctatttgatggcatttgttctcatcaagattgcctatgaagcaagtattgaaccaatcggtaaacgtcaaacgaaacgcctggttattttgatagtcggtggcttgctcagcattggccagttggcgctctactatgggccacatgtacgtggtgtgcagaaacaatcgctctggttgttaatcggactaatggttttggctagcgttatttttgcagcgtggcaaaaaggagcacgttggcaaccatgggtgattggtctgggagccgtattgacgtttagtgaactggtgattaatggccgcttgacgaccactaagttaccgatgggcgatcaagttgtttatgcgcaacaataccaacgccaagcagcactctttgaacagcttgaacggcaaacacctgatttctatcgcgttaataaccaagcgattctcttaaaaaaagcgtttaaggaaccgtattatgggtacaatgatgcgttgacctttggacagtatacattgaacaattattcttcgacacttgatgagcggatgcggacgatgttggttaatctcggtttttatagtaagaatgcccggcggattaacgggattgggcatactgtgctgactgacctactatttgccaatcaatatgacctaattgctaagcaaggacaggttgtgacacaaccccataaaacgttaggcttagggtttgcggttaatgaccagctagcacacgtggctttgaaagcacatgagccgtttgaaaatcaagatcgaattatgcaagcgatgacgggacaaacgacaccattttatcaatataatcaattagatttacaagcgcaaaaacgtcggcaaattacgtttacaacgcaagttaagacaagtggatatgcttatctatacttgccgcaacaaaacttatcaaagctgaaagtgaaaattaatggccgaacacataaagtaccgattgaattgaatgggaccacgattattggtttgggtcgctatcaaaaagggcaacaactaacgctgacaattaccagtcggcaacctaaagcctttcgtaagattcaggtggctagtttagaccaggctcatttcgatcaagcttttgatcagttggcacaacaacgcttaaagatcgacctaaaacaactgtcggcagataatggtcggattgctggtgtagtaccagctaagaccgctgatcaattactttatctaagtgtgccatatgacagtggttggcatgcgcaagtcaatcatcaaacagttcgtacacgacgagtcatgggcaatatgcttgcagtgccacttgagaaagggactaaccaagttcgcttagtctatcgtgcgccgggactaattatcggcgcgatcatttcaacatttagtttaatgacatggggacttatcttaattaagcaacgccggtattaaaaaagcaggttaacgatgacaatcatcatcgctaatctgctttttattgtggcttatttggggtgtagttgagtggctaagccgagaccaattaaggtcaggccgagcaaactaataaatacgacttggtaaccggcgacacttaaaaggagagttgcaagggtgacgcccagcgcgcccgcaatttgacgaatcgtggttgtgacggcagtgccgtcagcgagcacttgatccggcaggctattagcaccaagtgtaacagcaggcatcatgacaaatgcgttgccgccttcgatgaaacaggcacacaggatcatcaatggtaatgacagccattggtagaagccaatcaaagctagccattcaatgctaatcatggttaggccaacgagtaaggtcggtttaaagccaattttatcagctaaccggcccgcgagtggattcaaaaggcttaacacaacggcagcagggaccaatgctaatcctgaaagaagcggcgtcaacttcaattgagcttgaaaatataatgggtagatgactgtggtgacaatcaatgaaatataggaaatagcagtcaatccgaccgcaatatcgtagttaaggtaaccgagaatatgtaaattaagaagtggcgttgtctgggtgagttgccggtagacaaaataacccagtgctaggcagctcactaatccgataccccagagtccgattgggttgatagtaggatgattagcgctactgatgacatataataaaccgattaatccagttgtacataaaacggaaagaccatcaaggtgatagggcttagccggcataacatcagaaatagtgaagttagctgttgctaacacggttaagataatcagaataaaggcgatgaatagtcctcgccagctgaagtagttgagaataatccctgaaataatcggcccacaagctagtgcagagcccattactaaaccagccaggcccataatttggccccgttgattttcagcagtaatggttaataagacagtttgaaacgatggaaataaaacacctactgcgatggcttccaacgcccgcccgaacaatacccaaccgaactgattagcgaagacaattaatagcgttccaatagtaaataaacttaaaatccccatgtagagtcgtttgaatgggatgttgtttaataaccaaggactaatcggcatcatgacacacattacgagcataaaaccggttgtcagccattgaacagttgtggctgataaatcaaaataggccattaaggttggataagcagttgaaagggcagattggctgatagacattgtgaacgtgccggttagtagggtgaatgtaaatagttttagtgctgttccagatagataacgttggttggacaagtaatcagatcctttttttggcttgccttaactataggacgtcatgttttatttgtaaaatgaaacgcaatttgaaatcgttatcggtaacaaaggctaataattagccttttatctgtatttagtatatatttatactcatgataggcatttagatattatattaaagggggaacgaccatgagtgtcaaagcggatcaactatcgactcaggaatacatcgtacggtggaatcaatttttagaacggtttatcgtgtttgaaacagtatttagtgagtacacccggaccagcaagaacatcatcaaagggcgctgtctggtgggcgaaaatttggaatcgttaaacgaatattttcaacgtaacttacgggtttttaaacaatttattgatcaagtcacattactaaatccgccaaaagaattacgagaaattaaccgtcagttacaattagtaatgactgattacgtctcgtccgctgaagccatggtcaccgccttcaacgagggtgatgagttaaacttatatcagaaactcacaacgagccgtcaacaacaaaagagtgatcgaacacgcattagtgaacttttaaatcaaatcgctgtttttaaaacacaggcagtcaaataaaaaaacgacacccatctggcaactctcagccggtgggtgtcgttttttttgactagataattttacgccgagcatattcgataaatttaaacttatcggcacggtgaatcgattcggtgaattgaaggagggtattatcttgtagatgggtgacacctttaacactgactacggagctgttaggcggtaggttcagtatctgacactgtccttcagtggcgggaatcaccgtgaactccttactgccataaccaatttcgagtttgagtgtttcttcaaagtaacgatagagtgagtcttgtgcaaccccttttgaaatgtgggggactatgctagttaagacgtagtcgttatcgattaccaggggctgaccgttaacgacgcgcagccgttgaatgtaagtggcaggtaactgctcttcggattcaagatggaaaagggtttggggaacggtcgtctgtgttaattgcaagacttgagtgtcagtatgcatatcgaaaagactatctaattcacgataactggtcaatcctgaaatcggaaaagcatacttgtctagaccgagaaccaaagagcctctccctttaattttatggataaagccattttcaagtagactacctaatgctttgcggacggtttcacgcgacgcaccgtagagttcagtgagttcattttcacttggtaagaaagtgccgctttgatagagttggtgcgtaatcttgcgcacgagatctcgataaatcatttcatattttttagccattcgatattctccaatttgttttctcattcctatcataacggggattcggtgaagttgcaaggttagattaagcgctaacaagaaaacggttttaaaaagtgttgaaaacttgtacgtacatgatatatgattacggtgtactgagaaagcgcttttattcatgctacttttaattcaataagattcgggaggaattattatggctcaaaaggattattcacaactcgcacaggcaattgtcgccggtgtcgggggtaaagaaaatatcgatagtttaattcactgtattacacggcttcgtttttatctaaaggacgaatcaaaagcgaagaccgaagaaattaaagcattagatggggtcattaacgttcaaaaggcctctgggcaataccaagtggtcattggcaaccaagtcactgccgtttatgatgccgtgattgcagaaatcgggacagagtttgctggcgaagatgaaacggcccaagttgtggctgcaacaacgcgccaacaaaatttaacgccatggggccatgttaaagaagcctttaatcaattaatcggcgtgattaccggtgcgatgagtccgattgtcggtatcttagctgctggcgggattttaaaaggtgtcttggcgatgctaacgatgccacaacttggcgcgttattaagtgctaagagtgaagcgtacattgtcttaagtacgatgggtgattctgttttctacttcttacccatgttggttgggttcactgccgctaagaaattaaaaggtgatccagttttaaccgctgtcatcggtggtgttctggtgcatccttaattagtggctttaaacgggaaatcattgcttgaaatcgggtcattaaacttcccaatggtcaactacacatattcgattttcccaatgattctcgctgcttggttgctaaattaaccaaatgggttaaaggctggttaccaggctacttacaaattatctttacaccattgattgtgattgcagtcgtttctgccattacgctttacatcacagggcctgctattatttggttatcaaatggtttagcattcgggattcaattcttattattaaagagtggttggttatctgggttattaatcggtggattctatcaagtgcttgttatcttcggattacactgggggattttaccaattattgccaacgatgttgccgcaacgggtcacagttactttaacgcgattttaagcacaacaatgattgcacaaggggccgctgttttagctgttgcgattaagacccgtaaaacagctttaaaagaattatcatttgctggtgcggtttcagcattctgtggggttacagaacctgctatttatggggtcaacttgaagttccgacgcgtcttcattgccggtttacttggttcagccgctggcggatttgtcagtgggttattccacggtaatatgttcggtttcgcggggtcgtggatcggctttgcatcattcttagatccaaaacacctagcagatttatcaaacttatggattttcatcgcgtcatcagcggttgcaacgattgtgccatttattgtaacgctcgtttggggttataacgatcaaatgacagctggtgaagcaatggctaaaccacaaaaaccaggaacagcaaaataaacgactgaaataggagagatatcgcatggcatggtggcaaaaagcaacagtttatcaaatttatccgcggagctttcaagattccaacggtgacggaatcggggatatcaacggcattattcaacggttagattatttacaaaatcttgggattgaattgatttggttgacgccaatgtatgtttcccccggtcgtgataacggttatgatattgcggactattaccacattgatcccatttttggtgatttaaccgattttgaacgactcttaaatgaagcccacaaacgtgggattaaaatcatgatggatatggtggtcaaccatacttctgatcaacaccgctggttccaagagagtctcaaaggcaaggataatccgtaccatgattattatttgtggcgtgatccagtggatggacacgaaccaaataattggttatccaagtttagtggcagtgcttgggaatatgtgccagcacttgatcaatattatcttcacctatacgaaaagagcatgccagatttgaactggcggaatgaacacttgcgggccgagatttttaaaatgatgcaattctgggcagaccttgggattgatgggctacggttagacgtaattaacaatatctcgaaggataaagacttcccgaatgatacgtttaaaacgccaagcgacgatgggcgcaatttctatacgaatggaccacatgtgcacgaatacattcatgaaatgtacgaaaaggtctttggcccgaaccaatttgtcacggttggggaactttcctcaaccccaattgatgaagcgattcgttataccaatccagcccgtgaagagttatcgatggcgtttaccttccatcatgtgaaggttgattataccggtggcaaaaaatatggacactaggcgattatcggctgtctgatctaaaacgggtgcttagtgattggcaaacggggatggctgccggtggtggttggaacgcattattctggtcaaatcatgatcagccgcgtgccgtttcgcgcttcttggatgacggtcaataccgcgatcaatccgctaaattattagcattagtcgaatttggcttacaaggcacaccgtatatttatcaaggggaagaaattgcgatgaagaacgcgaacttcaccgccgttgaccaatatcaagatgctgaatccatcaatgcttaccagcaaatgttgagcgacgggattgatgaagcgttagcgattaagattttacagcagaaattacgcgagaactgtcgaattccgatgcaatgggatcaaacggcgcatcacgggtttacgactgggacaccatggttaatgccggttgagcacgatgattactcagttgccgctaagattcatgaacccaatagtgtctttgcattctatcaagaattagtgcgaatgcgtaagcttgtgccagttttaattgaaggggactaccaattatttgaaccagaggacgaagcggtttacacttatcaacgacacctagatactgaaacgattcgcgtgatggctaattttactggtcaaacacaagtccgttcaataccacacgtcaaggacgtgctcatggataattacgaacaaccgcagtttgatggtcagcaaatcactttacgaccttatgaagctatcatgatgcgggtttaagaaaagaggaagaacgatgtttaattttttgaaaaaaggaccagttggacaggtaacagcccccgttgctggcagttatttaccaattgaacaagttaccgatgaagtatttgcaagcaaggcagttggcgatggctttgccattacccctgatgaacggcaaacaacgattagcgcaccaattgatggtgttgttagttcgattttccccactaaacacgccatcatgattacaacaaagcaaaatgttgagattctgattcatatggggattgataccgttgaattgaggggcgcgccatttacgatgcacgttgaagcgggtgatcgtgtcaaagctggtgaagcgattgttgatattgactggcaacaactagcagccgcccaaaaggcaacgactatcatggtcgtcagcagcaacgccacctttgcaccagcagagccactaccaacaacagttacgactgacaccattattggacagttcgacttagcggcagaataggtgggttaagatgcaaccaatcattattgaatctgatgatttcgggatgaccataccgatttcgcgcgcaatcattactggcttaaaaactggcgtgatttctaccactaatgcgcaagtgacatcgcctcattttgaaatgagtgcggcactcgcccagcaacatgggattacggcaatgggattgcacttggttttcgacaaagaccgcccaattagtcagccactgacgattcccagcttggtaaccccggctgggttttgtcatgcttatcaaaccttacaaactcatccaaaacagttggccattgctgatgttaagcgtgagtttcaagcgcagattgaccgctttttggcgagtgggttacaactcacgcatttgacatcgcaccattttgtggcaacgttaacgcctgaaatctatgcaattgttctagaactagcgcaaacgtatcatgtccctgttcgcaatgaaacggcgcatttaagaccgacagaacaagcgtcctacctgctattaatatcggaatatgccgttttaacgactgggacgttgataacggcgcaacaaacaccgtatttaacgccacaggaaatcaaacggcaactgacacagaaaaatttggtaggtacgccggtgatcttaagccatattgggtatttatcggcagagttacggcataagagtcgtctgacgacgaatcggatagccgaattcaatgcgcttaaaacattaaagcaaaccaattattgggatcaatttagttggcaactgacggattactcagaattaggagcaaagtagcaaatgacacaatatcaacatttaacggtacttggtgatagcatcacggatcaacgtaatcattacgcacacaaatggtactaccagtggttagcagaatggctcgcgattcccacaatcaccaatctcggaatttcggggtcgacgattgcccaaccgtatgatccgatggttgaacgctggcaagccattcctgaatcaacggatttattattgatttatgcgggtgtgaatgactttggtcgtgatgtaccacttggtcaatttggtgatcagtccacagcaacattctacggcgcactacaaaaattacttggacaaattacgaaacattacccacaagcgacggtttattttatctcgcacgttcatattgggactgacttcttttcggccgtcaatcagggcggttatcagcaacaagattatgaaaaagcgatcgcgcaagtgacggacttgtttggcgttcagcatatcagtttgtttaacgaatcagcgttgtcatttgcggatgcacaacaagcggctgagctgagtttagacagtctccatcccaatgatgctggccatgaaaaaattgcccagttcttgagaactaaaattagataagtaaaaaggcgtcgagctaaaagttaactttagcttgacgcctttttttgtggctgaatttaagttagattagaacaaatgatgacggatttttttagaagagttggccaatcccgtagtgaatggccattgtaattaaaccaattaggatgttccgaataatggagactttgactttgccatcgcccagtttagcgctgataaacgcggtaatggaaaccgcgatggtgacggcaatgattgtgccggtcatcttgtaggcttcaggcagtagaatcattgtcacaagggggaagacgccaccgaaagcggctgagaagagggatgcaaacgctgcggcccacgggttcatataatggccaagctctaggtcatatttaacattaacaattgttgctaagggcttcttatgcattaagtccttagcgattgcgagtgccgtttcagaagtgacacctttggcttcgtaaaaagcttggacttctttaatttgatcatctttagctgtttttaagcgtgcttgttcaatggcaacagcggctttttccgtgtcactttgcgaactaactgaagcatattcacccgccgccattgaaaaagcacaggctaataaatcagcaagtccagcgataaaaatggtgaaattattggttgttgcggcggcaacactaaagagcacaccgacaacggttagaatcccgtcattagaacctagaacgccggctcgaagggtattcatcttttcttccatcgtttgatggggtttttcagttgttttgagtggggctttaagaggggtcataaaaaaatcctttctaagcgattattgtttgaataatgtcccaatagcgtaagtgactaccatggttaataatccggaaatcacattgcgcaacatggcttttgaacgattcgctttgccgagagcggctgcactgtagccggttagcgcaagggcaatcatcactgcaatgatggtggcttgcacgcgaatggttttgggtaataaggtgattgcggctagtggcaaaatagaaccgattggaaatgagatgaatgacgcaacagcggctgcgtaaggactggtaaaagcagtcgggacaaacccatatttttcacgtacgacagtcgtcaacggatcagcagtcatcatttcgtgtgtagcccgatcggcaagttcaggatcaatcccagtgttgacgtatttttgccgaacaaaagccatctgagacgcataattactgtttaaattcaatttcgtattaatgattgccatttcctgtgcgtctttttgcgtgctgacagagacgtattcgcccatcgccattgagatcgtcccagcaatcattccggcaattcccgaaatgaagatggcgaagctattgcttgtagcgccggcaacaccgataacaattccggcgacggataaaatcccatcattggcacccatgacgctagcccgcatcacgttaattttttgggcgagcgataatttttttgacaaggtgaagcctccaatactttttattacttaatttgcaatctaccaatataaaaacccccgatattggattttggtccaatatcgggggttcacttcacaattaagattgatattggtcccgttttttttgtttagataagaaaacgcctacattaaagttgaaaaatcaccctaaaagcaatatgatagaggatataagtgaaaatgaaggacgggtaactcatggctgatagtgtttcaattcaaaaactagtcaccgatttaaaattacaagtttatgccggtgaagcacatttaaaaaataaagcagtgacggtgagtgatatttcccgtccaggactcgaattaacgggctactttaattactacccttacgagcgggtgcaattatttggacggacggaagtttcatttacgcaaaatatgacaccagaagaacggttaatgattatgcgtcggatggcttctgaagatacgccctgtttcttggtctcgcgccaattagaaccgccaatggaaatgcttaaagcagctgaagaagcggggattcccgtgttggggtcgaatttatcgacaacgcgtttgtcgagtttagtaaccgattatttggaagggaagctagctgaacggcgctcaatgcatggtgtgttagtcgatatttacggtttaggtgttttaattactggcgattcaggtgttgggaagagcgaaacggcattggaattagtcaaacggggtcatcggttgattgctgatgatcgggtcgacgtttatcaacaagatgaacaaaccgtggtcggtgaagcacctgcaattttgcgtcacttacttgaaattcggggcatcgggattattgatgtgatgaacctctttggtgctggtgcggtgcgggctgaaacgtcaatttcgttaattgtccacttgcaaaattggtcacaggataagaaatacgatcgcttaggttcagataccgaagaacaaatgattttcgacgtccctgtaccgaagattaccgtgcccgttaaagtcgggcggaacttggccatcattattgaagtggcggcaatgaacttccgggctaaatcaatgggctatgatgcaacgaagaccttcgaagccaatctaggcaagttaattgaagccaattcagatgaagaagaatagttaaaagtcagaaaagttcgttaaatatggtaggcctaatgactagtttgagctatactgttagaaagacagtatgcaaactagtcttttttagagtgcgcagtaagccgggtatatcctgaggtttaacacagaatggcgaaggattgcgtcagtaatcgtttgacattcaggggtaaccggaaggatatggcttacggagcacgtttcggataagagtgcattcaagcttgtccaacttttgcgcattagcacagtgaagcgataagcgacgcagtcgattgtttgcttcacgacgctaagcgcagaaagttagcttgaaaagtacgttttgatgaaagcacatttacaaaaggagcgaataatttgaatctactattaggcgcattaaatccgattgcattacgattgggcgcattggagatccactggtatggtgtgattatcgcaactggggtcgttttagccgttggattggcattacaggaagctagacggcgcaatgtcagtgaagatgatattttaaatttaattttatgggcattaccatttgccttaattggggcccgactgtattacgtcgtttttgaatggtcgtattaccaagccaatcccggcgaaattattcagatttggcacggcgggatcgcgatttacggtggactgattgcagctgccattgtgttcattatctattgtcggcgtcatgcactatcgccttggttagtgttggatattgcggcaccaaccgtgatgatcgcacaagcaatcggacgttggggcaactttatgaaccaagaagcctatggggcgccaacaacattgcactttctccaatcgttacacttacctgattgggtgatccaacagatgttaattgatggtgcgtatcgtcagccgacattcttatatgaatcagcatggaatgtattagggtttattatcatcatgagcattcgccatcgaactggttggtttaaacaaggcgaaatcttatttagctatttaatttggtattcgtttggccggttcttcattgaaggcatgcggactgatagtttattcatcggtccattgcgggtatcgcagattgtctcactcgtcttattctttggtgcaattggtctttggatttggcggcgtaagcacagtcagttaccggattatttaaccggcaatcaagcaaaagaacagaaatagggatttgtttaaaaggagaattatcagatgacagtaaaaattgcagttttaggggccggttcatgggggaccatcttagcaaacttattagtggaaaatggccaccaagttgagttgtggggcaatgatcctaaaaaagtcgctgaaataaatgaacagcataccaatacacattatttaccagattttaaaattgatccccagttacacgcaacgattgatcttaacgttgcacttgaccaagttgacgttgtcttgtttgtaattccaacacaagcgattcgtgcggtggcggaacagattgttcctgtgatgattgcgaaaaaagtgaaacccgtgattgtgacggcttcaaaagggcttgaacaaggcacgcacaaacggatttcagaagtcttgacagaagccattccagaaaccaaccgcaatgggattgttgttttatcgggtcctagtcatgctgaagatgtcgcacaaaaagatattactaccttaactgccgcatcaagtgacttgattcaagcccaatggatccaagagattttcatgaatgattatttccgcttatataccaaccctgatgtggttggtgttgagatgggagctgctttgaaaaacgtcattgcacttggcgcgggcgctttaaacgggcttggttatggagataatacgaaggccgccttgatgacgcgtggcttagctgaaatttcccgcttaggcgttgccatgggggctaacccattaacctttatcggattatccggtgttggggatttaatcgtgactgggaccagtgttcactcgagaaactggcgtgcgggaaatgcacttggtaaaggtcaaaaattagctgatgtgctagccaatatggggatggtcgtcgaaggggtcgcaacatgtaaagcagcctatgaattggctcaacaacgttctgttgatatgccaatcacacgggccatctataatgtattgtatgaagattgtgatattaagactgaaattgcgtatttaatgcggcgttcaggtaaacctgaaatcgattttgatgaagtctaaaactttttaacgaataaagcggcatcattttgaatgggtatcgcacccatcatcagagtgtgttatgatgattagcgttgagaaaaaggctaaaggagaaccgattactttatgggcgatttggtatctgtaagaccaacttgtgagttttattttgacagagggatgcaggcgtttgaacgatttcagtacacgcgcgcattaacgtgtttacaacgggcaaagtcgctggctaagaccaaagatgattacatctttgtggtgtgccaattagcgatttgtttggaatcggttggcgactatcatggtgcggcgaccgttctggaagaaattccaaccgccaactatcagagtcatcctgagttacaatattttttagcaacggcgtatgcctttttaaatcagacgcaggcgagctatgaattagcgactgcttatttacagagtgacgattcggatttcgatgccgaagccactgaattattacaagaattgaaaccaacaagtccatcaaactggtaaaacagtttggtagacttttttttacataacgggtaagatacattctatgaagaacgagcactttttaaaagtaaggggataatagacatggttaaaagttatgatgtaattgtgattggcgcaggacctggtgggatgaccgctgctttatacgcctcacgtgcgaatttatctgtattgatgttggaccgcggaatttacgggggccaaatgaataatacagcagaggtcgaaaattatcccggctttaaatcaatccttggtcctgaactaggcgaaaagatgtatgccagcgccactcaatttggtgctgaatacggctatggtacggtcaactcgattgaactgcaaggcgagatgaagattgtgcacactgacgaaggcgatttcgaagcgcgttcaatcatcattgcaacgggttcagaacacaagaagattgggatccccggtgaagatgaattcggcggtcgtggtgtctcatactgtgcggtctgtgatggtgccttctttaagaataaagaagtcgtggtcattggtgggggcgattcagcgattgaagaaggcctctacttgacgcaattagccagcaaggtgacagtcattcatcgtcgtgatgaactacgcgctcaaaagattttacaagatcgtgcatttgctaacgacaagatggacttcatctggaatgcacaagtgacaactattgaaggtgacgacaagaaggtaaccggtgtcacttacattgataaggtaactggtgaaaccaaagaagttgctgcaagtggggtcttcatctatgtagggattgaaccaatgactagtgcctttggtgatctagggattctaacggatgccggttggattaaaacggatgaccacatggcaaccagtgttccaggtatctacgcaattggtgacgttcgtgaaaaagatcttcgtcaaattacaacagcagttggcgacggcggcatagcaggccaagaagtatttaaatacttacaaagtatctagagtgcgacggcagccggttagcttccgaggattaacacagaatggcgaaggattgcggtagcaatcgtttgacattcagggttaaccagaaaagacagttcgaggaagcacgattagagtgcgttcgaaacgattttatttttgaggattaacctaaaaatgtggcttatgacgcacatttccagcggtcgactaaattttagtcggccgtttttttattttgggaaaaattttaatttttagaaggacaagcattattaaataatcgacccagacaattagcttggtgcgcattaccgtacaaccgatgctttaggaaagcggttgattatggtatacttagaactagcttttagactaaaatgcgggggttacacaatgagctggcaagataattatgcaatttggaataatcaaacagaaatggatttacctttaaaaaaagcacttaacgaaatggcaaacgaccatgatgcattagaaaaagcatttagcgttccaatggaatttgggacagctgggatgcgcggtattttaggccctgggatcaactgcatgaacatttatacggtgcgtcaagccacagaaggcctcgctcaattcatgaaaacattaccagaagcgactaaaaaacgcggtgtggctatcagttttgattcacgttatcaatctgaaacatttgcgcacgaagcagcgcgggtcttaggtcaacatcaaatcccaacgtttgtttttgatgccttacgcccaacacctgaattatcatttaccgtacggcacttacatacctatgccggtatcatgattacagcaagtcataatcctaaacaatacaatggttacaagatttatggcaaagacggcgcgcaaatgccacctaaggaatccgatttaatcacaagttatattcgcaaagtaaccgatttatttgcgattgaagtggctgatgaaagcacattgcgcgaagccggcttaatgactttaattggcgaaaatgtggatcaagcttacttagctgaagttaagcaagtcacgattaatcaagaattggtcgacacagtcggcaagaccatgtcattgatttacaccccacttcatgggaccgggaaagtacttggtgaacgcgcattgcgtcaagcaggctttgaacaatttacaatggtcgctgaacaagcagttgctgatccagaatttgcaacgacaccattccctaatccagaattcccacaaacattcgatatggcgattgagctcgggaaagcacaacaagctgacttgttgattgcgactgatccagatgctgaccgtttgggcgccgctgtgcgtcaaccagacgggagttaccaattgatgactgggaaccaaatcgcttctgttttattacgttatattttacaagctagtaaagatgctggcacattaccagccaatgcagcggctgttaagtcaatcgtgtcaacagaattggcaacgaagattgcagcgagctacaatgtgaagatgattgatgtcttaaccggcttcaaatttatcgctgaacaaattcaacactttgaagacacagacgaaaacaccttcatgtttggtttcgaagaaagctatggctacttagtgaaaccattcgttcgcgataaagatgcgattcaaacattggtcttattagcggaagttgcagcttattacaagtcaaacggtaagactttgtatgatggcattcaagaattatatgcggaatacggctacttcgctgaacaaacgactgcagttgatttcgaaggggtcaatggcccacaacaaatggctgacttgatggttaaatgtcgtgaagaaagcccagttgaatttgccggcatcaaagtcgcttcagcagaagacttccaaacacaaacagaaacttttgcggacggtcatactgaacccatcaatttaccaacatctaatgttctgaaatatcacttagaagatggcacttggattgcgattcgcccaagtgggactgaaccaaaagtgaaattctatgtggggacatccgctgatgatgccgcaacagctgatttgaagttagcaaacttcgaaaaagcaattcatgaacttgtaaaatagatagggcttctgttttacatttcaggataacttacctataataaagaacagtaaatagacggactactgcgttagtcggtctatttttgtaagaaaagggaggtagtttggtatgggtatgcatcaatatttgcaaggtttgaataatttggagacactaaatcgcgcaccaggattgtttaaatatcaagaacattccgttgcagcgcactcctttaaagtagcagaaattgcgcaattattaggcgatattgaagaagaaaatgggcaaacgattaattggcaagtgctgtacgaacgcgcactgaaccacgattatacggaacggtttatcggcgatattaagacgccggtcaaatacgcaacgcatgaattgcggacgatgttggccaatgtcgaaagttcattaaccgctaacttcattaaaaatgaaattccagatttcttacaagaacggtatcaacgtcgtttgagtgaaggaaaagatgaaactttggaagggcaattattagccgttgccgataagattgatttactctacgagtcttttggtgaaattgaaaaaggtaatcctgagaatgcttttctagaaatttttgcggaaagtttaaaaacgattatgcaataccaaaatctcgcatgcgcccgttatttcatccaagaaatcttgccagatttactgagtgaagacttcgcagatcgagggaagctaacccaattagtgagacagacgctagcggaatagagtgctgttgtcagtcgctcagattcagagcatttgcctaacttggcgaattgacgctataagcggcgatttgacaagtgtagcaaagcgcaggaatctactgacaacagcacgtttccacactttagttgaaacgtgctttcattaagcatccttttccggttagctacaccagccgcatcatcgactgcgtcgctaatccgtctggttaggctaatcctcaaaggataaccgcttaatgacgcactctttaatcagcactctggcgaaagtatgttcggtgtggtagaatagtgaatgacttaaaggacaaggaatattattctttataaaatcggtaagtagacgttatggtggagggcaacttctacccggcgtcttcttttatcgctagcaaatggtaatggaggcttttgatgattgaacgacagaatgataaccaatttgatttagtggcgccctatgaaccagctggggaccaaccagcggcaattgaaacgttaactaagaacttcgaggcgggtgcaaaagcacaagtcttgatgggggcgactgggaccgggaagacctttacgatgtcgaacgtcatcaagaatttaaacaaaccaacattgatcatttcgcataataagactttggcaggccagctctatgccgagtttaagcaatttttcccgaataacgcggtagaatattttgtcagttactacgattattaccaaccagaagcttatgtgccttcaagtgatacctacatcgaaaaagattcgagtattaacgacgaaatcgacaaactacggcattcagcaaccagtgcgctgttggaacgcaacgatgtgattgtggttgcgtcggtttcatgtattttcggcttaggtgatccgaatgaatatcaagatcacgtcctttcgttacggccagggatggagattgagcgcaatgacttattgcgtcaattggtggatattcaatttgaacggaacgacattgatttccaacggggccgtttccgcgtccgtggtgacgtggtcgagattttcccggcttcacgtgatgatcatgcgttgcgggttgaattcttcggcgatgagattgatcgaatcgttgaagttgacgcgctaaccggtgaagtcattggtgaacgcgaacatgttgcgattttcccagcaacgcatttcatgactagtgaagaaaagatggaaaaagccattaagagtatcaaggctgaattagaaggccgactaacggaattgaaggcggacggcaagttgttggaagcccaacgtttggaacaacgaacgaattacgatcttgagatgatgcaagaaatgggctattgctcggggatcgaaaactattcacggcacatggaggatcgtgcggcgggggaaccaccttatacgttgctcgatttcttcccgaaagattcaatcatgatgattgatgaatcccatgtaacgatgccgcaaattcgcgggatgtataacggggatcgtgcccggaagcaaatgttaatcgattatgggttccgattaccaagtgcgcttgataatcggcctttgacgctacctgaattcgaagaacacgtcaatgaaatcatgtacgtttctgcgactccaggcccttatgaagctgaacaaaccgatattcaggtcgatcagattattcgaccaactggcttgttagatccgaatattgaggtccggccgattatgggccagattgatgatttggtcggcgaaattaatgatcggattgaaaagaacgaacgcgtctttattacaacgttaaccaagaagatggcggaagatttaactgactatctcaaagaactggggattaaagtccgttacttgcatagtgatatcaagactttggaacgaacggaaattatccgtgatttacggcttggtaagtttgacgtcttaattgggattaacttgttgcgggaagggattgacgtccctgaagtctcgttagtggcgattttggatgccgataaagaaggtttcttgcggagcgagcgctcattgattcaaacaatcggccgtgcttctcggaatcaaaacgggcaagtccttttgtatgccgataagattaccgattcgatgcgcaatgcaatggatgaaaccaagcggcggcgttcgattcaagaagcctacaacgaagcacatcacatgacgccgaagacgattatcaaaccagttcgggatgcgatttcggttgttcaatcagtcgaacaccctgaagaagtcaagatgaccaacgagattgatttcgatagtatgtcgaaagctgaaaaactagaaatggtagaacggttatctgaacaaatgcggaatgcggccaagaaactggacttcgaacaggcagctacgttacgggataccatcttagagattaagagtgaaattgattaaaagaggtaaagcatggcaaatgataagatcgtcattcatggcgcaagagcgcataatttaaaagatattgatgttacaattccacgggataaactggtggttgtgacgggattgtcgggctctgggaagagttcgttagcgtttgatacattatatgccgaaggacaacggcgctacgtcgagagtttatcggcttatgcgcgccaattcttaggccagatggataaaccagatgttgattcaattgatgggctcagtcctgcgatttcgatcgaccaaaaaacaacgtctaaaaatccgcgttcgacagtcgggacagtcacggaaattaatgattatctccggcttttatgggcgcgggtcggtcatccaatctgtccgaacgatgggactgaaattagtagtcaatccgttgaacagatggttgatcgtgtcttagcgttacctgagaagacgaaactccaggtgatgtcaccgattattcgtggcaaaaaagggcaacataaaaaagtatttgaaaaaatccaacgagaaggctatgtccgtgttcaagtcgatagtgaagtcatggacgttagtgccgatatcgaattggataagaataaaaaacacgacattaatatcgtggtggatcgaatcgtcgtcaaagacggtgtccggtcccgtttatttgactcgttcgaagcggctctgcgcttatcagaagggtatgcgactgccgatatcatcggtggcgaacaactacttttctcagaacactatgcctgcccaatctgtggctttacggtgggcgcgttagaaccccgcttgttctcgttcaacgcaccgtttggggcctgcccagactgtgatggtttaggggttaagctagaagtcgatatggatttagtgattcctgataccagcaagacattgcgcgaaggagccattgcgccttggaatccaattagctctcaatattatccacagatgctcgaacaagcttgcaagtcatttaaaattgacatggatcgaccatttagcaaattaacaccacgccaaaaagacattatcttaaatggttctcagggtaagaacttccacttccattatgaaaatgatttcggtggtgtgcgtgatgtggacgtgccgtttgaaggtgtattagccaatattgaccgccgttatcgtgaaaccaatagtgatttcacacggacgcaaatgcggacgtatatgactgaattaacgtgtcaaacctgtcatggtgctcgtttaaatcgacaagctttggctgttaaagtgggcggccaagatatcgctgccgtttcagacaacgccatcaaagaagctttaccattcttcgatcaacttgaactttctgaaaaagacagtgtggttgccaaaccaatcttgaaagaagtgcatgatcggttaactttcttgattaacgtcggtctggattatttaacgctcagtcggtcagccgggaccctttctggtggggaagcccaacggattcgtttagccacgcaaattggttcgaacttatctggcgtgctctacatcctcgatgaaccgtcaattggtttgcatcaacgtgataatgaccgtttgatcgggtcactgaagaagatgcgcgacttaggcaatacattaattgttgttgaacatgatgaagatacaatgcgcgcggctgattacctgatcgatatcgggcccggcgctggtgaactcggtggtgaagtgatggccgctgggaccccaactgaagtcgaacataatccgaaatcattgacgggccgttatttagccggttccgaatatattccagtaccgctagaacggcgtcaaggcaatggcaagaagattcgcgtgaccggtgcggctgaaaataacttgaagaatctgacggttgatttcccattaggtgaatttgtcgcggttactggtgtttcaggttcaggcaagtcaaccttagtcaatacgattttgaaaaaagctttggcacaaaagatgaaccgtaactcagcaaaaccaggtcaatataaaacaattacaggttatcagaatcttgaaaaactgattaatattgatcaaagtccaattggtcggacaccgcggagtaatccagcaacgtacaccggcgtctttgacaatattcgtgatttgtttgcgcaaaccaatgaagccaaactacgcggttataaaaaaggccgttttagttttaacgttaaaggtggccgctgtgaagcctgcaagggtgacggcattatcaagattgaaatgaatttcttaccagacgtgtatgtgccgtgtgaagtctgtcatggcagtcgctataattcagaaaccttggaagtcgtctataagggcaagaacattgccgaaatcttagacatgacggtcggtgaagccacagtcttcttcgcaaacattcccaagattgcccgcaagttacaaacgattgtggatgtcggcttaggctacgtcacattgggccagtctgccacaaccttatcgggtggagaagcccaacggatgaagttggcctctgaattacagaaacaatcaacgggtaagaatttatacatcctcgatgaaccaacgactggcttgcataccgacgatatcaagcgcttgttgggcgttttggaacggttagttgaagaaggtaacacgatcttagtgattgaacataacttagatgttattaagactgccgatcacatcattgacttaggaccagaaggcggcgataaaggcgggacaattgtcgcgaccggtacgccagaagaaattgccaacgtcagtgaaagctatacaggccaatatttaaaacctgttttagaacgcgatacagcacgcacaattgccgctcaggtttaaccagaagatggttgatagaatgtgtttaaaaagcgggcggttaagacagaatgattgctgtcttaaccgcccactttttgttttgtcaaatttagttgtagattgtccgtaaaaaaagtatcataaaggtattaacaacgagaggtgattgggaatgtttagaaaaaatgaatggcactttgattggtcagaatttatgacggggattattttcttaatcgttgcatattgcttgtttaatcaaccaggtaagacattatctggtttggtaatcgtgattgcgattgcggcgattattcggggaattgccaaaatcagtgcatatagtcggttacgtcaagagacagggatgcgcgcaacgttaatgttggtcgatgccattgtcgatgtcattttgggaattttgtttatcttgaatattccagctggagtggctgctttaggttatatctttgcattctggttcttgttcgattcaattgtggcattattgaatgtcggccatctcaagcaatttaacacaggcctatacatcgtttcgatgattctgaatatcttaggcgtaatcgttgggatcttattgttaatggatccagtggtgactgccgtaacgatggtgaccctagttggtttttactttgctttctttgggattaatgccatcatcatcgcatttgcaagacgtttatagtctctaaatttaatgattgcggaacaatttgattgttctgcaattttttttatggaaaaaataagctctttcaaatgcctagacattaggaatgaactcggtttaatagcattaaataacacgtgtcgagagtttcgacagctttcaatgacacaccaggaatgttacaatgataaaagcgaaaacttaaggggtggtctgatgacagatacattgaacttagtagtgattacagggatgagtggtgccgggaaaaccgttgccatgcaaagttttgaagatctaggttatttttgtgtcgacaatatgccaccgacattgctacctaagttttgggaattggttaaggagtccggcaaagtgactaagattgcattagtgattgatttgcgctcacgtgctttttacgatgagatcattgaaatgcttgctaaccttgataatacccaattcgtgacgactaagattctcttcttggatgcatcagatgaggaattggtttcgcgatacaaggaaacacgccgttcccacccactagcgatggaggggcgtttaatggacggtattcaaaaagaacggcgcctgttaactgaaattcgcaatcgagcacagatggtggtagatacttcaaccatgtcaccacgacaattaagagaaaagatttttcatgtcttcaagacgtcagataatccgtcattccatattgaagtgatgtcatttgggtttaaatacggtttaccaattgatgcggatatcgtcatggatgtccgtttcttaccgaacccatactatgtgccagcatttaaggaattaaacggtttagaccaaccggttagagactatgtaatggcgcagccagcgactgaaaagttctacgaacaatttagtgggctgttaaaagacatcatgccaggttatctcaaggaaggcaaaacaagtgtgacaattgcgattggctgtaccggcgggcaacaccgttcagtagcgcttgcccaacgattggctgatgatttatcgttcgattatccggttgacgtgacccaccgggatatgaagaaacgcaaggaaacggttaaccggtcatgacagctactaatcggattatccgggtcattaaagggcgacgaccaaaagtcgttgtgattggtggcggcactggactacccgttatcttaaagagtctccgtgaacagaatgcggatgctacggcaattgtcacggttgccgatgatggcggttcatccggcgttattcgcgattacattaacgtggtaccacctggtgatattcggaatgtattagtcgccttgtcagatttaccacagttaacgctcgatatttttcaataccgctttaaatcacacgatgcctttttctcagggcatgcgattggtaatttaattattgcggcgttatctgaaatggaatcaggtatttttgatgctgttcaacggttatcagaaatgatggcggttgacggtcatatttatcctgcggccaatgttgcgctgtcgttgaatgctgaatttaaagacggcacccagttaacaggggaatctgagattactgcagcacgcaagcagattaagcgtgtttgggtctcaaaaacggatcaagatgatactgcagcacccgaagccgttcaacaagtggttgatgcgattttggctgccgatgtggttgtcttaggacccggcagtttgtttaccagtattttaccgaatctaatgattaaaaacttaggtgcggcagtcaagcaaactaaggcggaagtgatttacatttgtaatatcatgacgcaaaaaggggaaacggaacactttaccgatgccgatcacgtccgcgtgttgaatgatcatcttggtcagaacttcgtggacacggttttggttaataccgcacaagtccctgaaaactatttggatcatcaaaagtacgacgaaattctctggccggttgaacatgactttgatggcttacgaggattgggttgtcgagtgatttccgataactttttgaagttgaaagatcatggtgtgttccataatggacaaaaagtagcgagtgaaattatgaatcttgctttccaggtcaatacagctaagcgaggtgaataatcgtggcctcatatgcaagtgaagtgaagaaagaactgacgcaacttgaagtgcatcctgaacatgcacgagcggaattagccgctttaattcggatgaatgggtcactgagcttgatgaatcaccaatttgttttaaacgttcaaactgagaatccggcgattgctcgccggatttatagtttattgaaacaaaattatcaagttgaatccgaattactagtacgtcgcaaaatgaagttaaaaaagaataatcaatacatcgtgcgcttaaagtatgataccaataccgttttaaaagaccttgatattgttgaggaggacggttttaccattcatacaaaggtgtcagaagatgtcattaatgaagatcagcgcgtccgttcttatttgcggggcgcttttctagccggtggctcagtgaataatcctgaaacaagccggtaccatctggagatctattcattatacgaagagcataatcaagatattgcgcgcatgatgaatcgttttggcttaaatgccaaaacgactttccgacggagtgggtacatcacttatctgaaagaggctgaaaaaattgctgattttctacaagtgattggtgctaccaacgcgatgttgaagtttgaggacattcggattgtgcgggatatgcgtaattcggttaatcgcttagtcaattgtgaaaccgcaaatatgaataagacaattgatgctgctacaaaacaaatcgaaaatatcgaatacttgcgcgacaccgtcggattagataatttaccggcgaagttgcgtgagattgcgctactccgtttggaatttccagatattacgttgaaggaacttggggaaaaaatgccgagtggggcaatttcgaagtcggggattaatcatcggctcagaaaattgaatcaacttgccgaagcccaccaacaggggaatggataaggggcaaaataaatcggtagtgtacaatatttgacttgtacaatataattaagtacaataactgaaggacattttatggaggaaaattatatggttaaaccagtattattagatgaacaactctgtttttcgatttaccgcgcacaaaaggcttacaatcatttctacggtaaggtattaaaaccttacggattaacatatccacaattcatcgcaatgcttgcattgtgggaacatggcaagatgtcagtgaaagaattagggcaccatttagaacttgatagtgggacactaacaccgcttttgaaacgcttagaagctgatggttgggtaagccggaatcgtgcatcagacgatgaacgccgagttgacgttaccttaactgaaaaagcagaaagtcaaaaagaagaaatctacgaacgggttggtgcttgcacaaactatctcgatttctcaagcgataagtatcatgaattacgtcaagaaatgaatgaagttgaacatcatttgaatgcgattcaaatggataatgcacgtttttcataaaatgacggataaagggttccaaaagatttgatggtaaattgaattttttggaaccctttatcgtacatacaaaaacaggtgccccgagggggggcacctgttttttattttagtagttgacttaagtcagtcatatcaattgattcatcaaagatatggtcaccaataatgatggtcgggacgaatttaatattggcacgatcggcttcagcaataattgcggctaaattttctgcattatcttgtggcgttaatttgagattttgatcgatgtattttttaaattcatctggtgtcagatcattacgccatgttttttgatgcgtaaacaagaatgatagtgtttgcagcactatttcgggttgatcaaaaggtaaataggtatgggctaaattccccagttgtagatcctctttatccttaccaaaaggtttgataatacgttttagccgaccagctttgactgcttcagtcatcgtttcttcggattttaaaaaccacttgcggcaataaggacaagcggcgttgataaattcaattgatgttaatggtgcatctggctgaccaattgtaataccgccggtggttgtcacattctcgcttttaatcacactaatatccatggaagaccctcctttaagatactgccagtataacaaatttggtataaaaaaagggctagatcaacttgatctagccctttttttttactaatcctcagaagagaaccggtttattatctactctattttggttggttgaccataatatcgtcaatcaaaccgtaatcttttgcttcttgcgctgtcatgtagttatcacgatcagtgtcagcttgtaatttttcgaaggtttggcctgagttgtctgccaaaatttggtttaaacgtttccgagtcttcaaaatttcgcgcgctgcgatttcaatttcagtttgttggccttgtgcaccacctaaaggttggtgaatcaagacagttgagttaggcaatgcaaaacgtttgccctttgtcccagctgaaagtaaaacactggccatagaagcagccatccccattgcgattgtttggacatcagacttgatgaagttcatcgtatccatgatggctaaccctgcggtcacagaaccaccaggtgagttaatgtagattgagatgtccttatctgaatcttgcgcgtccaagaataataattgcgcaatgattgtgttagccatttggtcgttcacttcaccagataacatgataatccggtcttttagtaaacgagagtaaatatcgtaagcacgttcgccacgagatgtttgttcgataactgtcggtactaacattgaattgcctccttatataagccagagtagaatcactctgtagtctataaattgaattttacagcaaaggtcaattttggtcaaatagaaagcctcttttcagaaagattatggtcattttgtgttcgaactgaaaatatggtatacttaggaaagttaatcagcacttatcactgtagtatcaagtattatttgaagactttaatcaactggagtaaccatggagttacaagtagtgtaaagaggcggcttacgctgtttaaacgagaagatatttagaaacacaagaatttagacataattgaattaacccaaaaataaaagcgacgtgaatcacacgtcatctccactagccattcgatgctagtgtgcgtagccaattagtgactggctacctgacattatgtaagaatttaatatgcgaaattaattagaaggccacctaggaataggtggcctttgtcaatggtttaaagattgagttgttcatgaggaggactcaatcttttttaggttatatttgtaagcgctattgtcagaatgataatcgcgtgctattatatgaaattgaaccggttcaattctattcaataaagggagaaatgactgtgaaattcgtagataaactgtcagaaaagatgttgccgtttgtttctaaactcaataattagcggcatctaattgcaattcgggatagcttcattgtgacaatgccacttgttatggcggcctcgcttatggttttattaaatgcgctaattttctcaaacgccgctgttcaaaagattgttgatttaagcggattagctgatctagcaacaattgtgaataatgggacgatgagtattttatcaattgtggtctgttataacatcggtgctaatttagcaacgcattatgttcgctctgggaaagtgaacgatcctgcatttagtgcagttcatgctggtattttaagtttggcaacaatgtttattttgatgcctgtgacgagttccgtcactttagcaaatgggaaaacggcggaagcaacaggcgttttcttgcaaagtttaacctcgtcatcaggacttgcaacagcgatgttagcggcattgattagtacggagttattcattcgttttacaaagtttgaaaaaatacgaatcaagatgccagaaggcgtgccaccagcagttgcaacctcgtttaattcattagtcccagaagtcttggttgttttgatttttgctatttttgtatttattttaaatgtgacaaccgggttgaatgtccctcaattaatcgaccttgcgattcaaacgccactaaaatcgtttgtattatctgtaccgggaacgttattcttacaattcttctcagatttcttatgggtctttgggatgcatgggtctagcattttagcgccagttcgccaagcaccattgctacaagccattcaagaaaatatggcggctttttcagcaggacatgcgattccaaatattattacagaaccttttacaaatgcgttcggcttgattggtgggggcggctgtattttaccgttagtgattgctattttatgggcttcacggcggaaagatcaacggcaagttactaaattagggttaacaacttgtttcttcaatattacagaacctgttatgttcgggttaccagttgttatgaacccaattttcatgattccatgtgccatcattccatcaatcaatttagtgattgcttatttttcaacaagcttaggtttgattagtaaaacggtagcggctgcaccatggattacaccgcctgttattcaatctttcttggcaactggcggtgattaccgagcagcgattttaaccatcttattaattggtttagatgtctttttattcttaccatttgtcattgcaagtaacaaagtattaactgaggaatgaggtttttgaaatgcagtatccatatcaagacgcagcgctgaccattcgtgagcgggtcactgatttactttcacgaatgagtacacaggaaaaaaattggccaagtgaatcaacatctttatggatgggaaactttcgaagattctcagtcattaacgtttacagaaaaattcaaggcgcatgttgaatggggcggcggtgtcggtgcactttatggtttatttcgcgcagatccatggtcaaaagtgaactttgaaaatggcgttcgtgctcaggatagttggcgagttgctaataaagttcaagaatatgtcatggcgcattcacgctgggggattccagcattaattgttgaagaatgtcctcatggccatcaagggcttgaaggaatctcgtatccaactaatattggccgcggcaatatgtttaatacgcggttaatgcagcaatcatcgcatctgatggcacaagaactagcgcttaaaggcgttaacctagcgcttgtttcgacgcttgatttggtcaaagatccacgttggggccgttcagaagaatgttttggtgaagatcccattttagcggcgcgaatgagtgaagccgttgtggcgggttttcaaggggatttaattcaaagtgatgttgctttcttagaccaacctgctaaaccgcgaacgactgatgccattggtgttgtattgaaacactgtattgcgcaaggtgaagcattgggtggccataattcaggcaccgtcacaattggccaacgtgaattttcagacgtctatgaaccccttttgagtagtgtcaagaatgcggcaggtgtgatggctgcttataacgatgtggatggggtaccgtgtcatatcaatcagccgttgttgactcaagatttacgggatgtaaatgggtttcaagggattgtgatggcagatggtgttgcgcttgatcggttatcaggaatctttgaaacacaaccagaagctgccgcggcagccttaaatgcaggtgtcgatctaagtttatgggatcagacattcctaacgcttgatcaagccattgaaaatggcctagtagacgaagctgccttagataatgctgctggccgagtactagcgttgaaattcctgttgggtctgtttgaacaaccctatgtacaagccccgaatgcgcaattgacggccttgcttgaaaaatctgatgcgctgaatctgcaagtggcacgtgaaagcatgacgcttgttaagaacaatgggcttttaccaatccggaatcagccgcaaaagattgcggtgattggccccaatgctgatgaattatataatctcttgggggattatacagcagcacaaagttcagcgcgtcaagcgcaaacaatttatcaagcgattcaagaaatgtttcccgagtcggaagtcgtgtatgcattaggctgtgaggtgcgtaattcaattcatcaagaagaggcaattgccaaagtagttgagcttgcgcgcgatgccgatttaatcatccctgtattaggtggttccagtgcacgtaattttgatatggccttcctaagtaacggggcagtgagttcaaaaggcatcaacatggattctggtgaaaatgttgatgtcgcatcacttagtctgtgggccaacaagaagtgctgctcaagcaattgaaagcactaggcaagccaattgcatgtgtcatggtgcaaggccggccatacgatttaacactggtaaatgaacttgcagatgctgtattgattgcttggtttcctggtcaacaaggtggtcgcgcaattgctgaaactttagtgggacttaataatccaagtggtaagttgagtgtgtcttacccgcgcaatacccagcaactaccggtttactactatcaacgcgatgctgctaaacaagatgattactatgatgaggttggccaaccgttatatccatttggttacggacttagttacgaccaatttgattatcgacaattagcggttaagcaaatggttgacaaactagttgtaactgttaaagtaaaaaataacggacagtttgtaggtcaagaaagtagtttattatttgtcaaattaactggtggagcagttattcaacgaatgaagctgttaaaagctttccaaaagaatgccttccaaccaggtgaagaaaagagcattactttcgaactacctgctgctgattttaattacatggatattgataatcaggtgaaacgtgcgcaagcagcgactattatggttgctgatttagcggagaaaatcactttatcgatataagcggggaataagaatgtcatctgttagagaagtcgctgaattggccggagtctcggtcggaactgtttcacggtatctgaatgggcaacagcttaaagcagctaatcaagccaagattgcagcggccattgagcaactcgattacaaacaaaatattatcgctaaaggattgaagaacaatcaaagtttttcaattggtttattgatgaatagtatttcaagtcgatttggcgcggaagttgtttctggaatagaacaacgcgttgagcaacaagggtatagtttattattgagtggttttagtgacaaaccagcgttaattgatcaaaaaattgattatttaatggcgcattcgattgatggtttaattgttttcttagcaggtgaagaatggcaaggaatggaacgactagcggcacttgatattccggttgtgacgattaataacccaaatcagctacgcaatgttgattcgattttattagatgatcgcgcaagtgtggcacaagtgatgcaacaaattattgatctcggacaccagaatattgggatgattgccgctaatcaggatgattatgttgcccgtgaacgactggcaggtgctaaacagacgatggcagcttatccagacagacagttacatgtttttgaaggtgactattctcggactagcgggtaccgcggtgcccaagcattattagccgaaggtattacagctttatttgtcagcaatgatagtatggcctttggtgcgctcacttatttatcagaaaatggtattcggattggccaagatttactatttggtcactatgattatgccgatgaacatcaatttggacagttgccaatcctatcgattcaaccgccaacagaagcgattggattggcagctgctaagttgttattagatcggctccaaaataagactcagtcagatggtcaaacgattttaatgcatcatgaaatcaatggtctaaactgaatcatcgaaaagggcgagtagaataatctacttgtcttttttgagtttaatccttaggttattaatttacccgtccccgataatggggtacacttgtggtgtacattattttgcatgattattgaggagggcttggcgtggcacaaaaaatgattttggatttagatactgggattgatgatgcgttagcaattgcttatgcattgggatcatcagaagtcgatttaatcgggattacctcagaatacggcaacgttttgactgaacgaagcgttgtgaatagtcaacaaattttacatttattaggtcatccagacattccagtttatttaggggctgggcattcgacgacgacgcatgattttagcgtcttaccaattagtgcggaaattcatggtcaagacggcgttggtgagattcatctgacagagccccatccggaaatggcaactgaatcagccgttgattttatattacgtgcttgtcaggcgtatggggctgacttgagcatcgtggcaactggcccgatgacgaatttagcgttagcgattcaaaaagatttaccaactttgaagaaagttggtcaaatcgtgattatgggtggcgccttaacagtttgtggtaatgtgtctccatttgctgaagctaatatcagtcaagaccctgaagcggcggacttactctttaagagtggtttgccggtaacgatggtgggccttgatgtcacgttgcgcacactttttacacgcaccgatacggcagaatggcgcgcactcggtacaccagcagccaaagcttatgccgatatggttgattactatatcaaagcctatgaagtcacttctccccatttgcacggctgtgccttacatgatcccttagcagtcgctgttgcaatcgatcctagcttagtcacgactttcccattgaacttgaagactgagatagaaggcccgtcacgtggacgaacaattggggataatgcccgcctagatgatccagcaacgcggacggcggtttgtgtacaagttgatacgccgcgtttcttaactgaatttaaatcaagaattggacaattattagcgcagtagaatgagccatatagaatttcaaaaaagagctacgacaaaagtcaattttttgtcgtggctctttttttattgtacacaattagcataaaaaaaataatatttttgagcaattgaaaccctttcaagatgtggataaatgcgattatttcacaatgttaatatagttattataagcatattaatatgagaaccataattggaagcgatacattgaggacaaatgaaaggggtgcaatgaaatggaaaagaatagtaggatgaaccaaaagcatttattgcgacgaagtttgtatgtgtgtagtgggactcttttattactgaatagcggcgcggggatagcaagcgtggttgttatgaatcaaaatcgagtgcaagcgagcgaagtagcgcctagagctggcttagccgatatctcgattttagccaacgcgagtctaacatcggtgacaggaacagatatgacatcgaacgcgcaaggcagttatgatttagcattgaagtattctgggaccgggctggcatcagttggcgtcgcggataagaaggtcttggtttatgccttacctgctgagttacaaggaaaagtggttggtggtgcaactgttgatattgacgctaatctattaccaattacaccaggcgatattccgggggttagtttactttttggtgcgttagggacggcgattgacggggttgataaacttgtagcaatcccagccgttaaggcagcctttgatagtttaagcactattcagaacctaggtgcctaccaagaaacgttaccagcgactgtgtcaccagatggtaaaaccatctcagttgacttcacacagggctttggcaagtacgtccatcaagcttatgtaataataaaaaaataatagagagaaaaattccatccatcaaagaatggaacggtgacaataattagcttgaatatcttttcgtttattatattatgctcatttattttattataaagtattcacaaattttaaagaatgagtaactagaccacaatcccagcctattcccaatatttttgctatgcttagagtaattgaaggaggcttttttatgtatcgttatgccgttatttataatccccactctgggcacaacaatggtgagtcggttggtcagaaaattgagcaggcactcatcaagaatcaacacaaggtcgaactgatgccgacggaagggccgaaagatgcaacgcggttagctaaaaaagcggcgcgggcaggctttgatgtggtggtcgctgtcggcggggatgggaccattaatgaagtcgttagtggtcttgcgacgttagatcagccgccttatttaggcattgtacctgctgggaccgtgaataatttggcgcggatgttacaaatcccgttggacattgatcaagcgattgaaaatctgcagcaggttcatctgcgcccactcgacgtcggccaagtgaacgatgattacttgattagtacaatgacattgggcattttggcggacgccgcgttgaacgtgactcagagtgaaaaacaaaaatgggggccgctagcttttttaagcaaaggcatccatgcattagcggagcatcagcattatccgctaacgattgaaacgcctgatcggcactggcaaaaagacacgcaattcttgctggtgaccctcacgaattccgttggtggatttaccaacttcaatcccgaagcgcaacccgatgatggttatttccatgtcttcgttgcgccgaaaatgtcgctagcacggtcagtgatgtttctcccttatttcttaacgggtaattttaaaaagattcccgggatgacttactttaaagcaaatgaaatcagcatcacagtcgacaatcaacaaagtgcacaaacccgcattgatggtgatccaagtgccaagtcaccattgaagatgcgactcttagaacataagttgcaagtgattacgcctaatccggatttataagaccaggataggttagagtcatcggtaaaacaaaaaagaattcaaaattttctaacgaaaattctgaattcttttttttaattattgcgttaattcagcttgtttggccgcaacgcgttcactaatcttcaagaatggccagtagattagaacgccgaggattaaagtgaagccttgaatcacaggggcgcgccaatcgccgccggttgctaaatatgagttgagtaatggtggtgtggtccaaggtaccatgacgaccactcgattcatccagccaattgcggtgaagaagtaggcaatactgatgccaagtcctggcattaggacaaatggaatgatgagcgcaaagttgaagacaattgaataaccgaaaataacaggttcgttaatgttaaataaacttgggacgaatgatagctttgtaatatcacgactagcgcgtgattttgagaagagcaaggtcgcaatcaataaacaaatagtactaccggtaccaccaagcatcccaaatgtatcgcggaaaacgttgttgatgatataagggatgtgttgactagctgcgtaagctgccatatttttgttcatgttgattagtaagactggatccaataaagtaccgttaatgacagcttgatggatcccaaatgagaagaggagattaccagtcccgtaaatcagaaggagacccggtaaacttgtattaatgcgccgaagtggttcttgaatcacatttgtaattaaagtgatgagatcagtgtggaaaccagccgttaaaatcgcagcaagtgccgcaaatagactcatggtaatgagagctggaatcattgtgttgaaagaaccagcaacagctgatgggaccgcatcactcaagttaatttgtaactttttaagttttgagagggtcataaagagttctgttgtgactaaaccaataataatgccggcaaacatcccggttgttcccacgttttggaaagttaagacgccagaaacttcgacggctttcttggcagctagtggtgtgaccggaacagtattaggcatcatgatgattaaagtccctagtgccatgacagccgcggaaattttgttgacgtaattcttattacgtgctaaacagtagccgattgtgggtgcgagtaatagcccagcaacgttcaaagtcccattggtaatgtaagtgccgaagtattgaaagttggttagcatttggccgtggaggacccaggggaatacaacgttattcacgagcaccccaattccggcgaggatgaatagtggcataataatcgcgaaggcatcacgtaatgaacgcaaatgcacttgattcccgattttaaaggcgatatttgtaaactgatcaataaatctttgtcgccgacttccttgtttaagcatagaaaacactccttttagcgcactttttttagtctaattgttcaccgttagattgaatgactttttgcagccaataaaaactagccttcggaattctagcaaggtctttgaggtcgtgattggttcgattgacataaacgacgccatagcgtttattcatatcaccttttgaacttgggatgtcgattaacccccaaccaagatagcccacaacgtgagcgccgtcttcatcaactgcgtctttcaaagcctggatatggtcgcggtgataggcaatccgttcgtcatcttgaatcatttcatgattcagcgattcttcgcgaatgccaatcccgttttcgatggggaagatggggaggccagtttcattcgaaagttttgttaagacgtttctaaaaccgagggcatcaatctgccagccccattcgctactttctaaataaggattagggacactcgcatcgcgcatgtaataattgggtggtgtgttgggggttaattttgtgtgatcgagtgcgacagtgtagtagtaactgaacgctaagaagtcgttgtgatgacttgcaatgagcgctaaatcaccaggctgaatactgctcattaagtcatgattttgcatatattgcagtacttcggctgaatagtgaccttttgtaaaggcgtcaacgaaatgttggttgataaattctgatgcttttctagcagcaaagatatcttgggaatgactggttgcaggatagaattcttgataggctaacatcccaccaatttggtcattagggtagtgggcgtgtaagtaattggcgatttcagcatgcgcaaccattgtattattagcgatcgtataaagggttaataagtcgcgctctccgttgataaagccagtattatcaaagccaggttcaaagaaaaaaccattttgttcattaaagcttagccaatatttgacttgtccaccataacggtcaatgacagccttagcgaacttagtgaatgcttgtgtgacataccgacttgagaaaccattatatttttcagctaatgagtgaggctttttttgttgcattgatttgaagttgttgacaaaaattcacatcaatagtttaatggtttaaacttatgaaccattaaaataaaaccggagattaatgtatggatgaaatgaaggttattaaacagagctttgctgagctgagcccgtttttgacggtgcttggggatgagaagcggcagagtattattttagaattgatggctgataaagcttgtgatggcttacaggtcacggatttaatggcggcgtcggacttgtcgcgcccggcagtgtcgcatcatttgaaagtgttgaaggaagccaacttggtcgactttagacgcgaaggtacgaagaactattattacttgcaacacgaactgggcgaaatcaatcaactaaaaacactgctggatcagattacggcagtcatcgaaaaacaacagtaaaaggagtttttaaaatgcaaaccatcttaggtagtagcggtcagattggccaagagttagccaaggcacttcataaggacttcacaacggacattcgactggtcagtcggaatccaaaaaaagtgaacgcgaacgatcaactatttccagcaaacttgctcgacgccgcccaaactgatcgtacggttgcaggcagtgaaattgtttattttaccgctggcttaccgatgaattcagacatgtgggaagcacaatttcacattatgatgactaacgtgattaacgcgtgcgtcgcgcacaaggccaagctcgtctttttcgataatacctatatgtatgcgaaaaatagcacgctccagacagaagcgagtccttttgaacccgttggccgcaaagcggttgtccgagcggagatcgcacagttgttacttgataagatggcaactggcgcaattgaagcggtcatttgtcgtgcacctgaattttatggcccaggcaagacgcaaagcattacgaacacaatggtctttaacaatatcaaggcgggcaaaaaggtgcgcgtgccattgaatgatcaagcggttcggacattaatttggacgccagatgctagtcgtgcgatggcgttgattggcaatacgctggatgcatttggtcaaacgtggcacctcccttgtgatgacggtaaaacatacgccgaaaccatcgcgctagcaggcaccttaacgcatcaaccaatcgactataccgttttaaaaatgtggcagttcaacatcggtagctggttcagcaaaccgctaaaggaattaaaagaactcctacctagatatgaagtagataatctgttcagttcagacaagtttaagaaacggttcccagaatttaaggtgacgacgattgaagaaggggttcaggagattctttaaaaagtcagcctttcgctcgatagactaaccattgttcaatattatataatcgctttaaagtagcgatgttagtcaatcagataaggagcgtggcatgatgaagaaaccttttaataagcaacaagtgaatggtgaaccaaatcgggaatttgattccttctttgcggaagtcttaaagaagttgccgcaacaatcggcagctgtgattgcgaagtcttttaaccagtccaaagcattggcggaaaagacgatggcgaagagtcggacacagtttgatggggtctttgaagacttcctagtcggtgtggatgatcagatgcgtaaaaaggcacacaatatcattcacgcagcatcactaacagcagcgattattggctgttcaccaattccattttccgatgcgttcttgttggtgccggttcaattaacgatgatggcgcgtttgcataaactattcggtcaatcttggtcggctagtttgggcaagagcctgtcgaaagaattggtactcgttggcctaggtcggagtgcagtcggtaacattctaaaactggtaccggtcgttggaacggtcaccggagccgcggtcaatgcgaccgttgcgatgtcgattaccgaagcgctcggctggttaacagtcaagatgttgaacgacggcgaggacatcttcaatgatgttgtttcatttaaaaatcaattcagaacgctatttggattgttacggcgtaagtagttatttttcaattgacagaataagaacgaaatgatttaataaacccacatcactaatttttaggaggctaaccagatgcccaaagtactaattgtccacacgaatgttacgcgttatcaaggaaccaccgatccgaccggattatggctgggggaatccgcagagttcgttgatgaattgcaaaaagcggggattgattacgattttgtcagccctaaaggcggctttgtcccgcttgatccacgggggatgaagtacacggatgaatcaattctgaccatctatgaacaaccggattacgtgcaacgggggttagtcgcaacgctgaagccaagcgatatcaatccagctgactacgctgcgatttactatacgggcggccatggcgtgatgtgggattttcctgataatccagaattacaaacaattgcccgggaaatttataatcacggtggctatcttgcgtccgtttgtcacgggatcgcgggtttactacgcattaaaaatgatgacggtcagtatctgattgctggtaaaaaagtgactgggtttaccactgcagaagaaattattgcgggcaagaaaaaagtggtgctatttttaaaccaagaagtggcaactcaaaacggcgcgcaatttgtgcaaaaacggttttacaaaccatttgctgtccaggatggtcagttgattacggggcaaaacccgttttctgtacgagaagtgacgaagcgcttgattccggccctacaaaataacggttaggcattctttgaattctatgctaatcttatagaatgtagaaaagttaggagtcagaagatgagtgaaaaacaaacaccaaaattaacgcaaaaagaaaaaatgcaagcactaattgatcagaaaaaaggcggcggcagatcaaaacagaccgacgttgctaaaaatgatcggacaaagatgcgcaaagggccaaagatttttaacgaaatccactggtaaagagtgcgtttggttgcggttagcaactgagcattaagctaaaatccgcagtaatccaggttttaggagtactgcggattttagcttaagcggaagttgttgcaaccaaaaagcacgtttcaaacaaagtgcgtttgaaacggtttggttctgagcattaacctaaaaataagcactatggcggtccttgccatagtgcttattttgtagttaagcgcaggagccagtttcaaaaagcacgtttttgggctagggcaattttgcgctagccctttttgtgttaacgcgctatgctagaagcaacttattttaaatcgaatggagtctttgtatgtcatctttaatcgaacaaatgcaacaccatgtttcagttcgtgatttcgagccaacacccctcagcacgacagtgaaacaacaactcattgcagcagctcaaagtgggtcttcttcgaatttcgttcagccattttcaatcattgaagtgaccgatcccgtaattcgtgatgaaatcgcaacgatttctcaaagtgcggcgtatgttaaacagacggggacgttctatgtttttgtcgcggacttataccgacaagccacactcttagaaaaagcgggccagtcagtagctggcattcaaaatatggaagccttattagtcgcaacggtcgacacagccattgcagcagaggacatggcagtcgctgccgaatcgttagacttaggcatctgttatatcggtgggattcgcaatgacattgcgcgtgtcgctgaactactcgagttgcccgcctataccgtcccactatttgggttaacggtcgggattccgaagactaaaaatcaggttaaaccacgattgccgcaagttaatcaagtcgctcaaaatcaatatgatgtgcatcaggcaaccaacctagtgcaatacgatcaacaaatgcaaaattattatgctaatcgtgggaccaatcagcaacaaactgattggtcgaccaagaatacggccttctttagtgaagtgcgacgaccagcagtggcgagttttttgaaaaaacagggctttacgttgaattaagaaaaaatggtacttatcttaaaggacaatcagttttctgattgtctttttttgtgtcgtgcaagctcggatatgcgataataaaactagtcaaatgtaaccggttaaataggtataggagtgatcgttatgagtttaattgatgtacgacatgtagccaagcggtatcagatgggcgagacaacaatcgtggccaatcatgatattagttttacagtcaatgaaggggagttagcggtgattctcggaccgagtggtgcgggaaaatcgacagtgctgaacatcttaggcgggatggatacacccgatgaagggcaagtgttgattgatggtgtcgatattgcgcagtttagtgcgcgccaattgacggcgtttcgccggactgatgtcgggtttgtgttccaattttacaatttagtgccgaatttaacgacgcaagaaaatgtggcgctggcaacggctgtctcgccgaatgctttagatgttgcgcttgttttgcaacaagttggtctacaggatcggcttcagaattttccggcccaactatccggtggggagcaacaacgggtggcgattgcgcgggcacttgctaagaatccgaagctcctcttgtgtgatgaaccaactggcgcactcgattatgaaacgggtaagcagattcttaaattattacaagaagttagtcggcaacaacaccggaccgttgttttgattacgcacaatgccgcgattgcccagatggctgatcgcgtgattcacattaacgatgcgcgcgtgcgttcaattgaagtgaatcccaacccacttccagttgaaaagattgaatggtaggtggttaatatgcagacacgtttatatttacaaaccacattccgcgatattcggcaggcgattggacggttcattgcgattatcctgattattttaatgggtgtcttattgtttgtggggattaaatcgattgccccaaacttagaagagactgtggatcattttgtcaccacgcaacgcgtatccgatttacagattagtgggaccgctggcttaacggaacaggaccgtgcggtggtcgaaaaaatgcatggtgtccaagctgaattgggttatcggattccgtatcgcgatgaagcgcgggatgttaacttacaattatataattaccaaccaactgcacggcaaaatcgcttaacgctgactaccgggcgctatccgcaacgaacgaatgaaattttagtggataacgcggtcaagacgcattatcgtctggggcagagggtgacggttaagagtcagcagctattgacgcaccggtttaaagtggtcggttatgtggactcaccgctatatatcgaccgtcaggaacgtggaaccgtaccggtcgggaatggtcagctagatggctttatgtatttgccacaaaaggcatttgcacctcaaccgtattcggtgatgatggtgcgctttagtgatttggatcgtcacagtagctttttacaggcttatcgcaccggcattgcgactaaagaaacacagctcatgcgccaattaaaagcacacacaactcagccacagcaacagtacttattaactgcgcgcagtgctaatccgggttttaatgaatttacgagcttgtcggatcgcatcgatgcgatagggaatgtctttccggtcttctttttcttaatcgggattctaattacctttacaaccattacgcggatgatcgaagaaaatcgtaaggaaatcgggacattgaaggcactaggctatcgtaattgggaaattgcgcagaagtatttactatatgcgctactaacaggtagtatcggcaccgtgcttggcaccattttgggcacgaagttattaccgctagtcgtctatcgaatccaaaaaccggtctacacctttgcgcattatccaacccatttttggacagttccaattttattagccactggagcggtcttgattgcgacagttggggccacggggtatgttttaatccgcgatttacgcgagaagcccacccaattactccgaccaaaagcgccgaaaccaggccaacggatttggttagaaagaatcacaccgctctggcggcgattgagtttccatcaaaaagtaacttatcgtaatctttttcgctataaagcacggatgattctgaccatcttaggcatcgctgggtgtaccggtttaatggttgcaggctttggtttaaagacgtcaattggcgaagttgctgaccgtcagtttaagcaattgacccattaccaagcaattgtgacgcttaaaataccgaatagtacagcccaaacgaagtcgattttaacacagactgagaaggttcggtcttacttaccggtcacaatgacccaggttaagttcaagcaaaaagggattacggatcaagcggcgacagtctgtgcggtcgctgatcaagcaaaacttgcacagtacgtcgctttgcaaacaccgcgagaacaacaacgactcacattgccgaaacacggtgcgattattgctgcgaacctcgctaaaacatatgctgttcaaaaaggcgattggttaacgctacaaacggcacaggggaaacgtgctcgcattcaagttgcagggatcagtgaaaattatctcggtaatagtgtctatctccgccaagctgctctttcaaaaacgctacaacaaccagttgcggctaatgcctatctcatgcgcaccgctaagatgactaccaagcaagaaaaacagttggcgacccgtttgcaacaaacaacggaagtggcggccacaacgtttatcagtgatcaaggggctaagcaagcaacggctagtgctaatttagacccaatcgtttttattttcatcgggttatcagcggttttagcgtttgtcgtcttattcaaccttactagcatcaacgtttcagagcgggaacgtgaattggcaacaattaaagtcctgggctttttcgacaaagaagtgacggcctatattgtgcgagaaaatgtaatcttcaccgttgttgggattgtgcttggctttggaatcggtaaattactgacttggttcatcatcacgatggcctcgtcagaacaagtggcctttccactcatcattccagctagcggctacctgattgcggcagggatgacggtgctattctcactgattgtgatggggatgacccaccgcaagttaaaagggattgatatgattggcgcattaaaggagaacgaataaaagttttagcaaataatgcttttttacttgcttgtgacgttacgtcatcagctagtatcaaggcatggaggtgatattctatgacgcaatatacaacaggtgaactcgctaaattatgtaatgtttcggtgcggacggtgcaatactacgatcaggccgatttgttgaagccggcaagcttaactgaaaatggacgacggctgtatggggatgcgcaagtgcagacgttaaaagtcattctaggctacaagcagctgggcttttcactgaaggcaattcaaaaagtgatggcgagtcaagcttcgacggatacactgacattgctagtcgaacaacaactcaatcagttagtccaaaaagaaacagacttagctaaccagaaagtggcgttgcagtttgtactgcaatcgattcaaaatactagcgcggtgccttttgaaatgacaatcagcgacatagaagacgcaatggctaaaacaacacagttaaaaagattacatcggcgaatgttgatgtggggcttattgattgatggtgtggaaattggcttattaattcttgggtttctaagtggaatttggtggccaatgtggattgggataccggtcatcattgcgatggccatttatgtgacaacattctactatcaagaaactgtctatctatgtcccaattgcaagacggtcttcaaaccacgcctaagtaaaatgttctttgcccggcacacgccaaagacaagacaactagtgtgtccaagctgtggacaaaaaaattactgcatagaacagagtgcgtaagcaggcgttcgtatttttaggattaactggatttgccgaattggcgacgcaatcgctaatttggcaaatttggttagccacagaaatatgcctgctgaagcacgtttaagaacagagtgcgtttggtcgcggttagcaaatgagcattaagacaaaatcaccagtaatccgtttttggaattactggtgattttagcttaagcggaagttgttgcgaccaaaaagcacgtttgaaccaggcgtgcgcatcaaacccaaaaccatctaagctgggacgatttcgtctcagcttttttgagtcagatactttataatagaagtattacaaaaataaggaatgatgcaaatggaaacgacagtgatcatctcgacgctctttcggttggcaaaagtcttcgatgacatgggtaagttattgttcaaagcgcatttagatgtgccgttgacgtttgaccgtgcgcaatcgcaggccttattacggcgcaataaccgactagaattcagctatcaacaacttaaaacaagtaaaacaaaactattaaatcaattattggcgacggcgggagccgatccctatttgtgggccaagttacggcgactgcaggcattggatgtggcgagtttggcagccgttcaagcaaatccgcaatttaaccgccaacgcaagattaatcgtttgaaacaactgattatcaatttacaaaatgaaaaaatcaatgagagtacggtactgacgaagcaggcgctcgcctatttataccatatagcccctgataaagtggcggccacgagtaagccaggaccgatactggccgatccatttgatagccgcgcttttaaaatggacatgatggctcttaattatttagatcagtattttaacgtgcaggaattgcaatattacgtgaagtacctcgtgtttattcatgcgcatcaagcggcggaagcggtgattcactatgatgcgcgaacggttttgccgaatgcggaacaaactggtttttcggcagttgcctattacgtcacgcttaatcgccaatcgtatacctacatttcctacaaggggactgaggggacgatggatgatccgcggattaagtcgtttacgcagcggctggataattatgtccgtgagagttatcaagattggaagtataatattgatgcgatgctgattggcaataccgaaaatgatgagcaactccaactcgcacggcggtttacgcggtatgtggtccggcgggtgcgccgaattaatccggcaacaatcatctatggactgggtcactcactcggggggcattttgtgcagacggtccaattattggatgaaccgtttgatggtggctataccttgaatgctgccccggttcagttaaaacaaataaagcattatcggccggatcttttatctgcttcaaaatggcaacaattattcgcattgactaagcacaacaatacgcaagatccagctgtagcgatgcaagtccacgcgattttggggcacaattacgctacaattgaaaatgaatggttcattaaagatttaacgcggatctattttggctttccgtatacgttctacattgggacgacgcgctatttgaatgctaaaaattggcattacccgtttgtgactgacgtagcaccatatctccgaaaagatgagattcaggcgtatagccagttctggggtaatctaattcgctatttgaaacgtgttgagactagaaatgggtcgttgatgttggcaagtctgatgacatatggactgcagacactccgtgaagtgtatgccgcgattaaaacggaacaggcccaacaaatttttgcggcatatgcgcgctatttatacgatgcgcacatttttaaagacacccccgttcaggtacagaccaattttgaacgggaattatcacggccgcgcacggcactccgtgtgttacaaggcgaatggccatttttgaaaagcgtcaacaatgagatggtcgaaacggtgattttcttccacacgattgaaggcgctcaatactttacacgctagacagatgggatgttaactaatggatatttatttgaaacaagcaattttacaagtggtcgaccgcgaactcggcgatccaatttactcacaacaggtgctagatcttaccaatgggaacacacgcgactatttaaccaacaagattaagaaattatcgtctgcccagagtaagaccggcgtgctacgccaagatgctgagctcgcatcttttctgcgcgatgcgacagctgattttatcggcgctagccaacgcctcgttgaaaaatggtacacggtctatcaaaaaagtgacgatgcaccgagtgcggatgcgtttgttgtcttgtatgaacaagatgcgcaagcttacttggcttttttgaaggtcgattatcatcaagccttcacccattatgtcaatgctgaagaaggaccattgatgaatcaactgattattcaccaatcgattctatcgaataaaacgcaaaaggcggatgaggggtttgcgattaacctccagacgtttggctttgaattgatggagaagaagtacaccttctccggtgaaaagatgacctacttatcaacgaacgtgattgaaagcgaaccagcgccatcgctagaagaaaacgtcaaggttgttaaaaaagccgctgaaaaaatcggcaagaagttcgaagttgccaaacacgatgtggtcgccaacgtcaaagaagccatctacgatacaatcgaaaccaatggtgaaatcgacacgagccagatggcagcgaagatttttaaagacaacgtttcagcccaaagtgagttcaaagcagaaatgacggaaaatgcgccagcagcaccagcgccaatctcaccagccgtccgcgaaatcgccgaaaagaaatacggcaaacaaaaactcaaactctcaaacggcatcgaactaatcgtcccaatcgacgtctaccaaaacccagcgctattcgaattcatcaaccacccagacggcacaatgtcggtggagattaagaatgtagaagaagtgattagtagattatagagtgcgtaggcaagcggttatattttgagcattaactggatttgcccaattggcgatgtaatcgccgattgggtgaatttggttaagtacagaaatatgcttgccgaagcacgtttagagtgcgtttgaagcgggtcgactttgaggattaactacaaaatgtgacttatgacgggtttggtcataagtcacattttgtagttaaccggaaaagtcagtttcgaaaagcacaccaaaaaagagcattcctctcatcctatcgagaagaacgctcttttactatgcctttctttttgcccagattaaacggataatcttatcgaattccgtgatgattagaatcaagaagcctgcgccgatcgaaacgccccattctaataaggtaagcggttcggtgtagaaggtttgttgcatgaatggcacgtaggtcaggatcaattggagaataatcatcagtgcgataatgccgaatgccttttggttggtgaagaaagcttttgaaaaggcgagtttcgcagtccgaatattgaacaagtagaaaatcttgctgatgacaatgatattgaccatcattgtgctggctgtgacttgatcgacaccgcggccgagtaaccaatcgtaggctaacaagccgattaaggccatcaagacggaaacatatgccatttggaaaacatcgtgtttattcatcagcgcttggccggtcttacgtggcttgcgggtcattaagccatcttcagctggttcgaagatgaaggcgaattgaatcgtaatcgccgagaccatgttaatccagagtaactgcgtcgcttgcaacggcatatcttgttgcatcaaaatcgtgaaggcgatgattaagccttccgcgaaggaagtcgggagtaagaagagaatactctttttgatgttatcgtaaatccggcggccttcacgaattgcgacggacattgttgcgaagttatcgttggttaaaatcatatccgcggaatctttggcaacatcggttcctttaattcccatggcaaccccgatgtcagcgcgcttcaatgcgggcgcatcattgacaccgtcaccggtcattgcggtgactttgcgactggcttgtaaggcttcgacaatttcgagtttgttatgtggtgtggtgcgggcaaagacttggtgttctaaagcggcttttggtttttcagcgtccgacaagcgatcccattccggcccggtaatcgcattaatcgttggtgctaagcctaacttttcaccaattgctttagccgtcagtggatggtcaccggtaatcatcttgacatcgaccccagcagcgttcatttcggcgagcgcttgaatgacttcatcgcgtggcggatcgataatcccggcaacccctaagagttgaatcccttgttggagttgttcatgggtaattgtagcagtcgttgttggcacgtcgagataaccgaccgccacaacccgtttgccttgttctgataaacgggtcacatcggcattccagtcatcgattgggaaatcgaccattgcctgttgggccattgggaataatttatctggagaccctttgatatagattcggtgcgtaccatcagttagttgcacgagtttagcaatgtagcggtaatccgaatcgaaaggtaacatgtcaatttctgtatttgttggtaagtcgtcgataccatgaaccttatgatataaggttaaaaaggcaccgtcagttggttcaccgttaatggtccaaccattgtcggcttgataaagcgtcgtatcgttggcttcataactagcctctaagaattgtgtgagggtggtatccaattcagcaggttggtcatttaataaaatctgaccttcgggcgcatagccattcccgctgacttggtaagtcgtttcggcggtgataatttcggtcacggtcatttcgtttttagttagcgtccccgttttgtcggtcgcaatcacgtcgacggagcccaacgtttcaacggcaggtaagctcttgacgatggcgtgtttgtgcttggccatgtcgctgacccccattgcgaggattacggacattgttgcgggtaatccttcaggaattgaaccgaccaccatcgtgacaatcgcgattgctaatactgagagtgagtaatgttcgccaagtaagccgaagaggaataaaaagacagccgcaccgatgacgacaaatgaaacgccggtccctaagccgttgatttcgcgagtcaatggggttgggcgggttttcgtttcggtgacagcaactgagatttgcccgatttcggtatcagcggcggttgcgacgaccacgcctaagccgctcccgttagtgacggaagtggaggcaaaggccatgttgacttgatcggcaagggcaacttcttcttcggttaagcgtgttgcaattttttcaactgagtctgcttccccggttaaggctgattcttgaatacgcagattatcggcatcaacgattcgtaaatccgctggtacactatcgccagcttctaggaagataacgtcgccgaccactaagtcttcagttgggatgtcgatccgctgaccgtcacgataaacggttgcttcggttgccaacatttctttgattcgttccaaagcatcagatgcgttcgcttcttgataataaccaatgatggcattaatgatgactactagaccgatgatgatggcatccgaatagtgacccatcatgagtgttaatagggctgcgacgattaggatgtagatgattaagttgttgaattggcgcacgaaaagttgccacttcggggtgtgatggctctcgagtttattcggaccattggttgctaagcggttagccgcttctgtttgcgaaagcccctgttcaaaatcttggtgggcataattggtttgcagttcgtctaatgtttgttgataagcgtatgttttagtcatggtaagctccttttaattatcgaaagtcaaaatgcggtcgttcgtgatcgttattcttgccgataataaggaataatctgatgaattaaacaaaacgcttcgtccgagccgtcatccaaaaatactcacctccagttagttattactctaaaattatcaggaaaaagtagcgatgtcaatctaatgaacactattaccaattcaacgtttaaactttgcgcccagtgcggctttgtggtaatattattacataagttaaaaaaacggttgaagcattgcgcgttcaagatttccttctttagggtggtagaagggaattttggcgtgctttttttatggagggaaatgaatcaatggcaactttagcaattattttaatcagtactttattggcaggacacatgagcaaacggattggaatgccagctgtgattgggcaactcctggtagggattattcttggacccgcgttgttcggtgtcttacatgaaaattcttttatccacacgttttccgaaattggtgtcgtattattgatgttcatcgctggcttggagagtaacctgaccttgttgaagaagtatttcaaaccaagtttagtggtcgccgtcttaggggtgattgtcccggtaatcagtatgtatgggatgagcttggcctttggcattagtcagctcgagagtttattcatcggggtgatttttgcagccacctcagtatcgatttcagtcgaagttttacgtgaattaaacgtgttagaaagtaaagaagggacgattatactaggtgctgcggtagtggatgacttactggccgtaattatcttgagtgtcttgaccagtctttttggggcgcaactggctgcagctagttcaacccacatgagtttagggttgagtttattgctgcaagctttattcatggttgcggtctactttagtgtgaaatggattgtgccatttgttatgcatttgagtcgtcgtttgttagtaccatatgcgagcgccattacatcgttaatcatttgttttggatttgtttggttcgctgaggccgttgaattgagtgcggtagtgggcgcgtttttcgcagggattgcgatttcgcaaaccccgtataagaaagaaattaatcgccatattgaaccgatcgggtataccgtgtttattccggtattctttgtcagcatcggtttatcgatgaacttagcaagcttgaatcaacatattctatttattacgattttaaccgtgttagctgttttctcgaagttaattggaagtggtctcggtgcgcgttggatgaataattcgccacaaggagcctatacaattggtgcggcaatgatttcgcggggcgagatggcgttaattatcgcgcagattgggtacaacgctaaattgttgagtgaactttattactcagagattattttcgtgattatcattaccactgttttggcaccgctgattcttaaacacgcggtgaaacgccaattagcaactgaaatcaattaagaaaaatcgtcagctatttgctggcgattttttttgcccttttttaaagttgacaaaaaaaggattgagcagtactcttatcaagttaagaaaaacatgtatttaattacatgatatggaggtttttaaaatgacaaaacaatttaaagatgtccgaaaattcggattaaatttgcaatctaccaattttatattatttcatccggcaacttgacaggaccctagtacatagcttgagtggtggttctttttttattttagacattagttcatttaattaggaattcagatagggaaatatactgaaatgaacgtaactgataaagtcggtcaagagtggcaatttatactaatttttgaaattacagataaagaagctaatcagggcaccgttgatttgaagaaagcaattaactgaggtgtcttactttaattgcctagcttgtttagttgacccacttgtctagaaatgttaaattgattctattcaataaaggcgttgattgttgggaggcgatgaaagtggatgaacgcattacagaataccgggatgcggtttatgagcaggtggtcaaagtcgggaagtcgttagggaacgtgacgcgtctacaactgttgaacattcttgcgcaaggccccaaaacggtggaagtcttagccagtacagtcggcttaagtgtcgctaccgtttcacggaacctgcaaattttgaaacaaacaaacttagtggcgattgaacgcgagaagaattttgttacttatcgtttaaattcagaacgggtcaaacaattggtaaccctcttggttgatgtctgcgaagaaactttgccagagatgacgattttggaaaaaacactcgcgcaagaaacaggtgcccccgaagcgttaactggtgacgcattgaaaacgaaattaatggcagacgatgtgtgtttgattgatttgcgtcccgcagatgagtttgcaagtcaacacttaccaggggcacgcaatgtgccatatgatcagttggatcaacgattagctgagctccccaaggataaagaagtggtggtttattgtcgtggtcgtctatgtgcttacgccaatgttgctagtcaacaactacaagctgctgggtttaaagtggcaacgtttaatcaatcagtgtgggaatggtcgcgagttatgaccgaaacggaataagatgaagcgtcctttttgacggcacgtcccaatggtggtatattatgagtaattcaatgaaatcgttgaatgattttcttgaaaagaaaggtgatcgcaatggcaacacaaattctaactgaagcaaactttaaagatgaagttcaagaaggggtcacattagtcgatttctgggcaacatggtgcccaccatgtcggatgcaaggcccaattgtcgaagaactagccgacgattacgcgggtaaagctaaaatcgccaaagttgacgttgatcacaaccaaaacttggcggctgaattcggcatccaatcaattccaaccttgttggtcatgaaagatggccaattagtgcaacaaatggttgggttacaacggaaagaaacattagcacaagaaatcaatactgccttagcttaaaaatagcttgaaggcgtatcacgattaaataataacatcatccgataagctcttaagtagggcatatattaggtgatgtttttttgtgttgttattttaagtaatccagcataacggctttaaagaagtcgatgtgtttgaggtacatttcttcatcaacatattcgtcaatcatgtggctagtatcattgccggggccgacaactgccactggtaagtcaggattgtgcttagcaaggtgggcggcgtcggtaccgccagcaacgtgcatcagtggataagcttgggataacttttgtgccccgattttttgaacagcttgaatgaatggtgcttgtggattgctcttaacgggtggttggttattaatgacggtcaattccagattcatgtctgcctgttgattgagttccgcaatgatggtattgaggtcagcaatcacttggtcgccagttaaggcgggggttgtacgaacccgacaagtaagttctgcgtgaccggggaccgaattaatttgttcaccaccgttgattaaggttgtgacaggcacgatatcgccgaggacatcatcaataggatgtttctgatcgaagtattgtttttgccgattgtagtaggcaagcaaatgatcaattgcgttaataccgagtgcgggcattgaactgtgcgcggttttaccagttgccgtcactttaaaatcaagggaaccgttatgggcgaaaattaagaaatgttgttcattggtttgattagccgcaaggagtttttgggccatttctgtggggaatttgtcggggttatttgccaaggcttgtttatcaacgccagatggttcggcaactaataaggctgttaaatcatcggcatagccttgagcggttaaagtttgcgcaccagtttcgttcttttcttcatcgacggttgcgagtagtttgatttggccgtttagaggaacatgttcatcgtgtaattcgatcattgcaatcacaagcgcagccagaccagacttcatgtcggttgcgcctcgaccgaagagtttaccatcgcgagcggttagagtgaagggatcactcgtccatttgctgcgtcaccgatgctgacgacgtccatatgaccagtgacaccgaggaatttgtcggttgcttcgcctagataggccactaagttttcgcggcctggtttagaagccactttttcagtatggataccatgttgtgcgaatagatcggctaagtagtcggcaatcacaccttctgcttggtctgttgtatcaattgagaccagtttttctaaaattgcgattttttcagttttttccatcatcaaaagacctccagataagattcaatatgcattatagagcccctattttgggaaagtaacggacataaattaagcaatttcgcaaatcaagtgggttaaaaaagccgtcacgcttagcgtggcggctttttattggtctggttggtgagggcttctttaaaagcctgaccggcgcggtttattcgttaaaccagtgcatatcaaacagaacgcatggattggtgccggcgcaacgattttaccgggggtgacggtcggtgagaatgcgattgtcgctgctaacgccacggtcaccaaagatgtaccagacaatatgattgttgccggaacgccagcgaaagtcatgcgtcaaatcaaattagaaaaggagttttaacatgtcaattcaaaataaagtcgtgatcattacaggtgcctcatcagggattggggcagcaactgccaaattattagcaagcaaaggggctaaggttgttttagcagctcatcgtgaagatcgtttacaagctttagcatcagaaatcggtgcaaatgcgatttatcaagcaacggatgtgactaatcgggatcaaatggcgagcttagtccaattggcgcttgatcatttcggtcgcgtagatgttttatacaacaatgccggcgtcatgccacaaggaaacctgagcgaacgcgattatgatcaatggcaaaagatgctcgatatcaacatcatgggcgttttaaacgggatcggtgcggtcttaccaacgatgcaagcccaacaagatggtttgattatttcaactgattcggttgccggacatgtggtttatccagcttctgccgtttataacgggactaaatatgcagtgcgcgctattatggaaggcttacgccaagaagaaaaagataacggcattcgttcaacaattgtttcaccaggggctgttaaaacagaattggtgaatacgattggcaaccctgctgttttcgaaggggttaagcaattaatggatgcaccagaagaatcagcgttggccctcaatccagaagacattgccaacgcagtcttatatgcgattgaccaaccagaacatgtagtggtcagtgaagtcttaattcgcccagctaaacaacaagtttaaaaaagtggtcgactaagcgattagcctaagcaggcgaataactgatgcagttagttgtttgactgatgtagctaaacacaaggcattgcttaggcgagcccgtttcaaagtggtatttagctactgagaattaataaaaaatcaccttaatctgttttttaagattaaggtgatttttttaattaagtgcaaccaagctgataatcaaaatatgaaatggatgacaacagcttttttaggctaaaagtcgtataatgacagtattctaaatgaaattggagatcataatatggcagaattgatgcgtttttatcaaagctttcaaccggaacattatcaagtttttctagatattaatcgggctcaaaaacaatttagtggtcggacgacaattacggggactgctaaagaagcacttgttttaattcatcagaacggtttagtgattgaaacagtgacggctgcaggtaagagtgtgccgtttacagttgataatgacgcaaatgccttgaaagtcgaagtcggccaacctggcgaagtgactttggtaattgcctatactgccgctttaacggattcaatgatgggcatctatccttcttattatcaagtcgatggggtgcaaaaagaattaatcggcacgcaatttgaaaccaattttgcgcggcaagctttcccatgtattgatgaaccagaagccaaagcgacttttgatttagcggttaaattcgatgagcacgaaggcgaaacgattctgagcaacatgcctgaaaaagaagtcatcgatggcgttcaccactttgaaacaacggtccggatgtcaacgtaccttgtggcctttgcttttggtgaattgcaaggggttcaaaccaaaacggagagcggcgtgcaagttggcgtctttgctactaaggcacatcaagcaaacgagctcgattttgcattggacattgctaaacggtcaatcgaattctttgaagacttctaccaaacaccctatccattaccccattcatggcagttggcattgccagacttttcggccggcgcgatggaaaactggggcttagtcacttatcgggaagcttatttattactcgatcctgataatactgccttggatacgaaacaccgcgttgcgactgtgattgcgcatgaattagcacaccaatggtttggtgatttagtaacgatgcaatggtgggacgatctttggttgaacgaaagttttgccaatatgatggaatacgtcgcaatcgatgcgttgcagccggactggcatatttgggaaagtttccaaacctcggaagcagcggcagccttacaacgtgacgcgactgatggggtccaatcggtgcatgtgcaagtcaataatccagccgaaatcgatgcgttatttgatggcgcaatcgtgtatgccaaaggcgcccggatgctcgtgatggttcgcgctttaatcggtgacgatgctctacgcgctggtttgaaagcttattttgcagcacatcaattcggaaatgcgactggcgctgacttgtgggcagcactggggaaagccgctaacttagatgttggggccattatgcattcatggctcgaacaaccaggttatccagtggtaacggccaaagtcgttgacggacaattaacgcttaaccaacaacaattctttatcggtgagggtcaagaagttgggcgtcaatggcagattccattgaagagcaactatgcggcagccccattattgatgactgaccgtgaattggtactcggtgattatgctcaattacgcgccgacaatgggcaaccattccgcttaaacgtggggaacgaatcgcatttcattgttcattacgatcaaacattattagatgatattttaaatagtagtgctgacatggcaccaattggacaactgcaactactgcaagacttacgcttattagctgaaggacgtcaaatttcgtacgcagatgttgtgcctgttttagcaccttttgccaagagtgattcaaatgtcgtggcagatgccctttacacggttgctggtaacttgaagaaatttgtgacacctggtgaagaaagtgaacaacacctgcgtcgattcttcgaccaattgagtaaagcgcaagttgcgcgattaggttggctggttcaaccgactgatagcaatgacgatcagttaatgcgcccaactgttttaagtgcagccttgtatgctaaaaaccaagcagccattgatgcagcccatactttattccaagcgaaccaagaaaaactggtcaccttaccagccgcaattcgggtactggtcttgatgaatgaggtccaaaacttcgggaatgccgcactttatgatcagctcttagcagcttatcgccaaacgagtgatgcgagctataagaatgatttgactgcggccttaacgcgcacgactgatcctgaattaattgcgaccttaattggaaaatttgaagatgccagcaccatcaaaccacaagatttgcgggcttggttccgcggattactcgccaacgacaagagccaacaagcaacctgggattggattcgcaacgattggcaatggctagaagagacagtcggcggtgatatggaatttacaacgtatatcacctcgattgccgcaatctttaagaccccagaacggttggcagagttcaaagccttctttgaacctaagctcaacaccccaggcttaacccgggaaattacgatggacattaaagtcatcgaaagtcgggttgcattgattggagatcaaaaagcagcggttaatgaaacaattgccaaacatatgtagtcgaacgttgtgcaagttaaattcaatttgaggggttttgagatgacgattaaattagtcgcgattgatattgatgatacattattgagttcacagcaccaactgctagccagtacgaaacaacaagttgctaaggccctggaacagggtgtgaaagtcgttttgtgttccggacgcccattagctggcgtggtgccctttttaaatcaactagggattgccggtgataatcaatacgtgattacgtttaacggcagtattatcgaaacggcgtctggtaaaatcttgaaagaagctggcatcagccgagaaacctaccaagcgattgatgactactcgcaagcaacgggcttaccgtataatgtgctcgatcaaaatagtgtgatttatacgagtaatgtgaatgttgcaccaatgacggtggtgcaagcttgggaaaacgaagctggtattcatattcgcaaaccgaatgaaatcgacgcggccacgcagatggtcaaagcggtctttacagggaccagcgaacagttagatgtacatgaaccacaggtacacgcgcaatttggaactgataattatgttgttcgtgcggctgacctctttttagaagtgatgcacactgatgttaataaaggcaaagcagtgcaatacctcgcgaataaacttggattcgcgccggatgaaatcatggcgattggcgatgagaaaaatgacatcccaatgttccaatttgccggtactgcggtggcaatgggcaacggttcagctgaagcaaaggcgcacgttgactttattactgctgataacgattcggacgggatcgctcaagcatttgatcaatttatttttaaagtataatcaaaaagcccctgacttttgtcaggggctttttcttcgatattataggtcttcaccattgctagcaatgacctttttgaaccagtagaacgattctttgcgactgcgggcgagtgttccgttgccgtcatcatcttggtcaacatagataaagccatagcgtttagacatttcagaagttgaagcgctgattaaatcgattggcccccacattgtgtagcccatcagatcaacgccatctttaacggcttctttcatttgttcgatatgcttgcgcacgtagtcaatgcggtactcgtcgtggatttggccgttcgcgtcaacctgatcgattgcgcctaagccgttttcgacgacgaagagtggcacaccatagcgttcccagagattgttgagggtaatccgtaaaccaacgggatcaatttgccagccccaatcgctagcttcgagatacggatttttttcgccgagaattaagttgccggctgttttttcgccagcgggtttcgctgagctgaccatcgacatgtaatagctaaagcttaaataatcaactgggtagtccttgattagttgtaagtcatcaggcgccatttcaagtgtgatgttgtggtcgttgaagtagcgattcatgtagttaggatattcgccacggacttggacgtcggtgaaaaagaggttcaattcatcatcttgttgtgcttggcgcacatcagcggggttcggtgttttaggataactttgcatccgcgctaacattgaaccgattttagcatctggcattaatccgtggcattgtttaactgcaatactgctagcgacgaattgatgatgcagtgcctgatagcgcagttgtaattgttcatcgggggcgagcgtatcatctaccgcgccggtaccagtgaagccccaagtacctgcattaatttcgttaaatgtcatccagtatttcacttgatgctgatagcgtttgaagaccgtttcggtatagcgattaaatgcggcaatcgtttcgcggctagcccaaccattatattttaacgtcagtgccaggggcatttcataatgggagagggtgacgactggttcaatgttgtattttttaagttcggcaaaaacgttatcgtaaaatgccaagcccttttcgtttggttgtgcatcatccccgtttgggaaaatccgcgcccacgcaatactcatgcgaaaagccttgaagctcatttcggcaaataaggcgatgtcttctttataatgatggtaaaaatcgatcccgcgccgtttaggataaagggtatcggttggatcgtcaatcgcggtttgaatgctgtctttggttacggcgttcatcgagaagttctgacggtcagtggatttttgaacgacttcggcagttgtgagtcccttaccatcaatgttccaggcgccttcaatttgattcgcggccgttgcaccaccccataaaaaatcaggtttaaagccagtgattggttgttttgaatacatagtagtccctccagaaaattaaaatggttgtccgtcatataagacactaccattggtcttaatgatgttttgataccaatagaaagaatctttcggtgtacgcgctaaggtaccgtggccgtcgttatcgcgatcaacgtatacatagccgtagcgtttcgccatctcaccagagccggcgctgattaaatcgatacagccccatgaggtgtagccgatacaagggccgccatcagcaatcgcttggcccattgcggtgatattttcttgcagataagcgatccggtagtcgtcgtgaatctgaccgtccgccgtgactgtatcgcgtgcgcccaggccgttttctacgatgaagagtggtttttgataatggtcatagagttgattcattgtaatccgtaaaccgaggccatcagtttgccaaccccattcgcttgttttgagataaggatttttgagtgaggcaaagacgttgccttcagtttggtcgttgacggttgggtccgcgctggttaaacgagatgaataataactaaacgagataaaatcgaccgtgttggctttgagaatcgcttcatcgtcgggcgtcatttctaagacgacctctttagctttaaagagccgtttggcatagtttggatgggcccccgcgtgattgaacgtcaatgaagaagtagccttcacgattggtttctagtgctttgaagacgtcagctgggtttggtgtattaggataagtttcaccggcagctagcatacaaccgatttgattgtctggatcaatttcatgcgcaagtttggtcgccaatgccgaagccaccagttgatgatgggaagcttggtatttaatttgatccgaatgattggcatctgagacatccatgccgccacctaaaaatggaatatgcaaaatcatattgatttcattaaacgttaaccaatagtggactttgcccttgtagcgtctgaaaaggacctcgcaaaagcggaggtagtgatcaatcatttgacggtctgcccacccgttgcatttgtccatcattgccaacggagtatcgaagtgattgatagtgaccagtggttcgatatgcagttcacggcaaagatcaatcacgcggtcgtaaaaggtaagcccggcctcgttaggtgttgggtcgtcgccgtttggaaaaatacggggccaactaatcgagagtcgataagttttaaagcccatctcagccatcaagcgaaggtcctcttcataatgatgatagaaatcaacggattcatgactgggataaaagtcgtattgcgtagcttgtgcctttttaggatgcatcaacgcctcccaacgaccatgatgcgcgtctggcaggatatcgacaagcgataaacctttgccatcggtttgataggcgccttcgtattgattggcagccgttgcgccgccccagagaaagtcttttggaaatggtgtgtgattagtcatcatcggtctcctttaagtattatttgagatttaaaagtttatcgttggttgtgacgcggccacttgtgattaatggatcaacagcgtcatataaattactgttggtgataattacgggtgtcgcgatttcataaccagcagcttgaattacttcgatatcgaaggtgagtaataagtcgccaggcaggactgcttggccttgtttcacgtgaactgtgaatggtttaccttcgagttgaacagtatccatcccgatgtgcattaaaatctcggcgccatgttcagaattaatcccaattgcgtgtcccgttggaaagacgaggctgactgtgccggcaaccggtgcgaaaagttgcccatcggaaggaataatggcgacccctttgcccatcaccgctgatgagaagacagggtcctttaacgctgagagcaattggacagttccgttaagcggacttgtgatgatttcaggtgtgactttcgcagcgggagtagcagtacttggtgttgtttctggtgtagttgtcggtgtttcaaccatagccacttggtctgctttagagataccgaagaataaggttaataataaagcaaccacaaaagcgacagctgaagcgatgattgcaccataaacggtcatatcgagaccagttttaggattgataaagttgggtaaaccaaagacgccaagaccaccaactaagtaaccacgtgtcccgaataaaccgagtaaaattccaccgactgcgccaccaatacaactgaaaacaaatggtttttttcgtggcaaagtgatcccgtaaattgcaggttcagtaacgccgaagattccggagatgaatgaagaccaacctaggccttttaattttatatttttagttcggagggtaatcgctaaaacagaaccgatttgtgcaaatgatgcagcgaatacgagcgttaaaatcgtgtcgtaaccgagtgtggaaatgttgagaattgccagtggcacgatgccccaatggagtccgaagataaccaatacttgccagagtccccctaaaacagcaccggtcacaactgggctgaattgatagagcgcgttactaccggcccctaataaatcaccgagccatgttgataatggcccaatcactaagaaagtcacagggacaacaactaacgctgtacaaaacgggactaagaatgtgcgaatcacttctggtaagacttttttgaagaatggttcgacttttgaagtgaaccaaacagcaacgatgatggggataacagatgatgcataactcatcataatcactggaatgccgaggaatgtggtgtagataggagattcaaaaagggtgccagcaaataatgtgtagagtggctttgccccggactgtgccaacgtggaagggattaggccaacaatcgatgggtaaacgagggtggccccaatcaccatcccgagaaatggattgactttgaatttcttgctggcgctgtagcccaacataatcgggaagaaatagaagaatgaatcaccgagtgcgaatagaatctgataagtgccagatttagtcgtgagccaaccgactgcgacaaagagcgcgacgagccctttaatcatcccagttgcagctaaaacgcctagggttggtgcgaagatgccagaaattaaaccaatgaaccggtcaagcaagctcatcttcggttgttgatcgtcatcatcaggcacgatgccttcaccagcaatgttgccgatttttaaaagggcatcgtacacatctgcgacctgattaccgataacgacttgatattgaccgccactttggacaacggtcacaacgccgtccatattttttaacgtgtcagtctgcgcctttttttcatcctttaatttgaaacgcaagcgcgtggtacaatggacaacgctgcggatattgtcggatccgcccacgtttgccaagatatctgttgcaagttgttcgtaagccatgatagtacctccttagattaataatggttaaaacaaaaacccggctaatgaatacagcctaaaaataggttgcattcgttaactgggttaatgcctgatcgaatcagtaacacaccgttttattcagtttgttgatgttgtgtgacacgccagatatgcaagagcagataaaccgcttcatcagactgtaaagtccagttcatttcatgctttaaaaaagcagaaatctgttggacgacttgataagcttgtggatagcgggtgatcatcatcgccagcagtgccggatcgagttgtgtaacaggttcctgggctttttttagtcgccgaataatgaagtagcgtagatgtgagataaaacgactgtagttaaaggaatcttcatctagaataatcccaaagtttttttgaacaatgccgatgatattggccacgagcttggtcatagtcatcgtatcttcaatttcgctatcgccgtttttgatattgacgaaatgataggtgagcgggacggtttcaccgtctggaagggtgaaacctaatttttgattgatgagcgcaattgtctgttgtgcggtttggtactcagttggaaaaagattccgtagttcccacagaagcgactgatcggttagcgtcacatgggcatcgattcgttgaactgcaaattgaagatgatccgctagaatcagatattggcgatcgttaattttagtattaagtgctggttcgactaacgccacgatttcagacatgatggctagcatcttagcgttaattgccgtcaatgcttggatttgggtagcatcaaagcctttagaaccagttgcaataaagcgccgttcgatttttgcttcatcaactaaatcaccaggctgtttgccaaaaccgacgccgttaccaatgacaatccactcaagcgcttgttcatcttcaaccagggcagcattattattaaaatttttttgaaatttcatcttacccctctttcttataatgacatgaaaaagacccactagttcatcacagggttactgttgtgagaagatagtaggtcatgcctgatcgaatcagtaacacgctatttgatatattcaatatataccataagtgtaagcgttatcaaataataattaaggcataatcgataaaatagttaggtttttattgacataacctaactatcgcgttaaactgattttcgttaggttaaccgatataaaaactaactaattatgaaagcagtgattaatatgacagatgaaacacaatcaattatggcgttattcgcgcagttaattcaatcacggtccttcgtcgcatcggcgtggatgaccgttggtaaggaacgccgtcgcgattttatgaacacgaaaggcaaatcacgactcttgaatttactttctgcaaaagatggcttaacgaatgctgaaattacagaattattggatattcgtcctagttcagtcagtttgcaagttaaagcgttagaagaagaaggctacgtgatgcgccaagcctctgaagcagataagcgcgtctcgctcatctttcttacggataaaggtcgggcttcaattgaaaaagggaatttggaaaccgatcaattatcagaaacgattctggcagggttaagtgaagcagaattaaaagagttacaggccagtttaactaaaattgcgcataatgtgaaacattcacagattgatgcggcctttttcgaacgggcgcatcaaatgcggcaccatcatcatggagaatggaatcgctcaagattcccttggtaggaggttgttagcatgcaacaaatgagagtcgcaccatctaaaagtcaatttagtttcaaagattttctcggattaattaaggatacgaaaccaaagtattggcagttgtttgtgggattagcgttaggattagtcgcaaccggtgttcaattagcggtccctagttatgccaaacaactaatcaatagtttttcaaaacagtttaatatttacatgctcgttgggattgtcgtgttgttcattttaagtgcagtgattagtgccgcttcaggctcattactcggctttttcggtgaggacgtcattcagaagttacggaataacatctggcgtaaattactgcatttaagagtcagctacttcgataacgtgaagtcaggcgaaatgacgtcacgattagtgaatgattcaacgcagattaaagatttattatcccgatcatttcccgggttagtgacagcgatttttacgattgttggcgcatttgccatcatgcttttcatgggttggaaaatgacgctaattatggcattctcagtaccgctcgtcatggctgtcatgttgccgattgcgaagaagtcccacgccatcggccacacacggcaggacgaactcgcgcgtttcaatggtgaaacagacgaaacgcttagtgaagtcatcgaacgctgaataacaagccagtcaacaagggcaaacagcgattggtaacctctataaaattggtttaaaagaagccatttatgactccgttgcgggtccgattatgaccgctgttatgatgggcttaattgtcggtattttggcttatggctctgcacgggtcgcccaaggcacaatgacgattggcgccatgttctctttcttgatgtacctatttcaattaatgggaccggctgcaacgctcggtcaattcttgacgaccctttctaaagcaagtggttcaacggaacggattcaagaattaatgcaagagccagaagaagatttcagccaaggaaccgtggttgatgtcgaaggacaaacgttgcaggtagagtcagttgagtttggctacgatgatgaccaaacgattttgcacgacttatcatttgaagcgaaacccaatacggtagtcgcatttgctggtccttctggtggtgggaaatcaacgattttcagtttgttggaacgatactacgaacctcgctacgggacgattaagattggtgaaacgccaattaatagtgttgcattggccgattggcgtaaacagattgggtttgtgagtcaggattcagcgattatggcaggtacaatctgcgataatttgacgtatggattgactggtgagtattctgatgcgcaattgtgggctgttttacaactcgcatttgctgaaaaatttgtccgtgagatgccagaagggctcaacacagaagttgggactcgcgggattaaagtttcaggtggacaacggcaacgattggcgatcgcacgtgcattcttgcgtgatccgaagattttgatgttggatgaagcaacagccagtctcgattccgaatcagaagcgatggtgcaaaaagcgttagaaacattgatggaagggcggacaacattagtgattgcgcatcgtttaagtacaattgttgatgccgaccaaatctatttcatcgaaaacggccacgtctcaggcgcgggcaagcaccaagaattagttgcgagccacgaactttacaaagaatatgtcgaaacacaattcaaccaagactagagtgcgtcattaacgggtagcttctgagtagtagcagcgtatcgtgaatgaacgataaaggcgttcgtttgcgatatgcggctaggcgtaagaagctgttaatgaaagcacatttcagattagagtgcgttattaatggtaatcgtttattttaagtgcttttaaaaacagagtagcgtccaattgattcgggcgctactctgtttatcgttttggggtataatagtaggaaatgataactagttggtgcataatagaccaacaaaaaagttttgagtaatggagatataacaatgaattttacttagtggcgctgttgttagtcggcgtgatcgtggtcaacgtggtcaagcaacttgtaccacggataccagaggcctttttattaattgcgatgggttgggggctatcgtttatgccagtgttccataatttcaagttggaacctgaatttttcatgttactgattattgcaccgttaatgttcattgatgggcaaaaacaatcctttgccaatattcgtaagagattccaaggaatttttctgttgtcagtcgtcttggcggttgtcacggcagttgtggtcggtttgattacgaaacaaattgaagcacaatggaccttcccattggcgcttgcactagctgcgattgtcataccaaccgatgcggtggctgtgaagtcgatgactggtagcaacgagatgccaaaaggcgttggtgaagcgcttgaattggaatcactttttaatgatgcgaccggattggtcttgttagaccttgcgttatcagtgctctcaaaaggcactttttcagtcgtacagggaattggacacttcctttttgtcgccgttggcggggtggtcatcggtattattggtgggttcttattggtaatgctccggtttaacctgaatcggcatggtaaaaatccggaattaacaacgattccgattagtttgctaacaccatttgcgatttacctattggctgaacattttggccgttgtcgcaactgggattgaacataactgggaagctgatcggctgcgattaacttcgaccaatgtgcaactcacatcacggacaatttggagtattttatcggatattcttaatgattttgttttcttaattttagggatttcattaccagaagttgctcgaaacttcacgcaaatgggctggcgcggggctgtggcattattaggggttagtgttttaatctatgtagcaatgtggattgtccgttacgcttgggtattacgtggggacagtccatggattgctgcctttttcggtgatcccaagggtgacgatcggccattctttgcgtgtttatttgctgtgagtgggattcatgggactgtgacgctagcgatggccttttcattaccaaataggatagcggggcatgcgtttccatatcgtaatgagttgattgcgattgcgacttttgtcatcttaatcagtatggttatgagcgcaattgtcttaccccgtaagttacctcaaaagacggaagcttatgcaatggctgatctggatcatattcgcaataaaatggttgattatgtcatcttacaaatacggtcacaaattgaagaccatgcagtccgtgaagctttgacagatcaattacagtcacaaaagagtaatcgactaacggtcgatcgtgctcaaacaacggctaactatacagcgttattgagtgaaactaaagaagtcgttgataatttccttcattgtgatgatgttaatgaacggtacagcccagaagttgttaatctgtatgatcgaatttttcagcgcgtgttagttgagtctaaacgcgatcatcttgggttacgcatgaaacatacgattaaacattggaagaaagagctgttttggcacacaagtcatcgcatgattacaaagaaacagcgactacggttccatgccgctaaaatggccgataacccccagtattcagaacgggttgagacttggcaagcaacttgcgatgctttattagcgcttaacagtgaagtcacggatgcgattgatcaatatctcgatactgttttgacgaatcgcttgaaacaaaaacacagtgataacgattttgtttacctagttcggcggacaatgaatcacttctgtgcacacgttaaacatgattatcaaaagagtgcagcagttgtacccgatattctatatgtacaagctttccaacacgaatatgattttgttcaacaagggattaatgctggctatattaatcaatcgattgcaggcgttttgtataccgaaattaatcaagcacagttattgcaactccaacaattccaaggaacggatatggctttaatcgaggcttaagaatctgagctttattttcattgcggtcactggtaatgtggcagtataggaaagggtgatgacgatgcaatttggtgaacgattaaagcaacaacgagaacaacgcgggttaacccaggaaatagtcgcgcaggaatttcatgtttcacgcgcaacgattgccaattgggagcatgagcggagttatccagatattaactgtttaattgccatcagcgactactatcagatttcgctcgatgttctattaaaagaagatagtggcatgacagaagcgatgcaacggaaactcgagttgcaaaagctaaagcccttctattggggttcgttattaattgatggctttattttagtgattttaatgggtcgcttttatcaattaccattcctgaaaactgatccgtttttagtaatggtgattttgctaatcgaagtagctaatctctacatgatgttgacggttcgtaaccgtcaacaacagttaggaattcaagatatatcacagaagtcgattatgatgtatgtattcggtggattaattgttctgttaattgttggattggcactactctcaagtcaatggggcgcaattggcgttattagtgggggcgttattagtgggattgtcatgcgggttcgacaacgccgctcgaagaatagctaaataagtgcctcaaatacattagttgtgcctgctttttggagtctgttagtaacattaacaggggtaattagcttggtcaaacgaaataaaaaagcttaatctgactgtggtattctgttcttgcatcaagacaataacctctttcattgtttgtgtaggaacatcaatgataacagagatttgtcttggtgttttttattttatcaagttagctaaaagtatttggctaacttaattataaaacgcgcgaataaaaatctatcaaaatgctgtcttgaaaaagtatcaggaccggttatattttgaaagacgtcaatgggcaacatcgaaaattgaaaggcgtcaaattacaggaaatgttgatgatgtattgctgattgttgatagggacattgtggaagtatatacaatggatgggcttcaagtaatgactggcagagtgttctaaagtaagtaaatggtttcttagcacaggaaaaatatagagtattgtaaattaatagttaatcaattgttctttaatctcccaccctaaatatggtacgcttatgttagtttgaacgaggacgtgagtgggatgcagaaaaaagcactttttaaaaatggtctcgggattatcattggcgccttgatttatgcggtggcgattaatgatttcctgattcctcatcatattggtgaaggtggcgtgactggcttaacggcgattggctactatgcgttagcaattccgccagctgctacgaatttggttctaaacggtttattagtgattgtcggctttaagtatttagagaagcaaaccatctggtattcggtctgggcggtactctggatttctatcttcttgcggctcccgcattttatcggctaccatacgacacagacgatcattccgacgataattggtggcgtcttgatggggattgcaatggcgattattattcattgccaagggacgattgctggtagtacgatcttagcgaagattgccaatcgctatttagggatccaaaacggctctgcgatgcttttttttgatttaattgtcgccattccatccggcttcattatcggcttccaaaatatgctcttaacgattattgaattgtatttatcagcagtcgttttgaataaattattggctaaatttggggcaaaacgcgcggtgacgattatttcggatcaatatgcaacgattgcccaaacattgtcgacgcaattccaccagggcatcacgatcattaaagcgcaagggtactatagtcaaaatgaccggccgatgctgtatgtcatttgtacggccaaacaactcgcgacgctcgtaccggtggtctcaacgattgacaagcaggcgctagtagtagtcgaagaagtccgcagtgtccaagcagaacaattgaaacagcttctttagaaacaccgtggttgaccatggtgttttttactcgctaaaattagttttatatagtaagatataattaatgctgatataaaaacaatttaggagtggacgggatgaaaaccaaaaagggtggttatttaactttgaagattcgcttattaaatacccgactttttaatcgttatttaacggctgatccacgcgcgtgctataacgctgaacaggggaaaattttgtcagcattgtgggatcatcatccgcaaactgctacggaattggcacaagtgactggcttagccaatagtagtttatcgttgatgttacggcgcttagaagaacagggattattgatgagtgagcaatcgccacttgataagcgcaagcgggtctttgacttaactgaacaaggcgctaatcagcaacaggtcggtgatgacgttagtcaacgattgagcgccgttttttacaagggcttttcggatgctgaagtggcagctgttgacggctatttagaacgaattttagcgaatttagaagcagaggcggccgtttttaaccgtcaagcaaaaggggagcgaaccaataatgacaattgaacaaccaacgtagattgaagtgcgtggcgggaacgtcaataacttgaaaaatattaacgtcgatattccgttgaaccaatttgtggcgatttcgggaccgtctggttcaggaaaaagttcgcttgcgatggggattttatatgcagaaggctcacggcgttatttagaggcgttgtcgacgtacacgcggcgccgaattacgcagaataaacgctcacaagtccaagaagtgcggcatattccatcagcgattgcacttcggtaacgaccaagtgtgccatcagaacggtcaactgttggttcgatgagtgagatttttaatgtcgtcagattgattttttcacggttagggacgacacgttgtccaaatgggcacgtgattcaaccaagtctaaaaattgcccaagcgatggacttagctggcgataaaatggggattattacgtgccctacttgccaagtgcagtttatggctaaatcggccgaagactttgcctttaattcagctggcgcctgcccagaatgtcatgggacggggcagattcaaacgttagatgatcgcaaaatcatcgcggatgaaaatctcagtattgaagacggagcgattgcctcatggcgattgccgggccggaatttcatgccaaccgttgctgcccacattggggtccgaattgatgtcccttacaaggacttgacggccaaggaaaaagaaattgtcctgcatggtaaacgggcgaagtatgcggttgatttccatacctcaacgggccgtgtgtttagtacggagaataccctctatgaaaatgcttatgacgctgtttatgaatcgctaaaatcggttaaaagtgatcgggcaatggctaaagtcaattcatttttccatttttcaacctgtccaacgtgtcatgggacccggttaaatccggcattactgacccaaacagttggcggacaaaacattgcagcagtttctaatttgacgttaggcgcattagaagattgggtgcgtgctactaaggccgacttaccggatgaaatgcagcaaatggcgacaattttatttaagaacctattagaaacactgcaaccgttactagaattagggttggattatttaacgttgtcgcgcaatgggaatacattgtcaactggcgagcttcaacggattcaattggcgcggacgttgcgaacagcgacaactggtgtgttgtacgttttagatgaaccatcgattgggctgcatcctgacaacgtcgaagggctaattcatattttccggcagctagtggcacaaggcaattcgttagtggtagttgatcatgaagtgaatatcatcagtcaagcggattgggtgattgaaattgggccagaagctgggcgcaaagggggacaagtgattgcccaagggaaacccgcggatttgatccagaatccacagtccctgattggccactatatcgctggtcgagcgaacatcttatatcctaaagtcactgccgcaacgactggtgagcagacaacgatgacggttggccaatattttaatctgcatgatgtcacaatcaaagtgccagataaccaaattacggcggtttctgggttttccggcgccgggaagacgagtttgattctagatagtttagtgccagcaattgaagcgcaccaccaacatgagcaattacccgagcaggtcacccagttgacgaccgatttaacgtcagtcgtcagcattgatgccaagccggttggtaagaatatacgctcaacactcgcgacttatacgagtatcatgaacaatctgcggaaattatttgctggtttaccagaatcacaagcgcatcattatgggatcgcgcacttttcgtataacaataaagaaggcgcctgtccgaactgtggtgggttaggcagcattattttggatattcaatatttgccagacatggaagaaacctgtccagaatgtcatggtaaccgctacaaaccagagattgaagccatcaagtggcaaggctatagcatcgttgatctattggctttatcggtggaagaagcaatcccggtctttgcagatgtgccagcaattcaaaaggaacttaagattctcaaagaaattggcttagcttatttacaccttggtgaaagtacaccgagtctttcgggtggcgaagcacagcgcttaaaactcgcaacgcatttgaataaaaaacgggcgggcactttattcgtcttcgatgaaccttctgttggcttgcatccgcgcgatgttgaaaccttagtaggcgtcatcaaccagctaaaatccaagggtgccaccattatgatgattacccacgaccttgatttgatgaccaatgccgattacccgatcgacttggggcctaaaaggtggtagtcaagggggccaagtgatggcgatgggtgcaccatttgagcttgttgcctcagacgcggagagtttaaccttaagttatttacgggcacattttaagaagtttcaattaacaacaactaaagtggggtgaaaaaatgggacaaacctctttgtttgatcaagagatggcgatgaatgcgccgcttgctaatcgggtccgaccgtctgatttagacagttttgtcggtcagaagcatttagtcggaccaggcaagtttttacgcgaaatgattgataaagatcaagtgacttcgatgattttctggggaccacccggcgttgggaagaccacgttggcggagattatcgcgcgcaagacggcttcgaaatttatcacgtttagtgccgcgatgaatgggatcaaagagattcggaagattatgaatgaagccgaagaaaaccgccaactgggtgagcggacgattgtctttattgatgaaattcaccggtttaacaaggtgcaacaggatgcttttttaccgtatgttgaaaaaggcagcattatcctaattggtgcgacaaccgaaaatccgtcgtttgaaatcaattcagcgttgctgtcgcgttcacgcgtttttgtgctaaagcaattgacggaagcggacattattgagttgctacaacgggttttaaaggcgccccaagccttcccggatttaacggttcatatcagtgatgaattattgaagcaagtcgccatcttttcgaatggggatgcacggacggcgctgaatattttagaaatgttagttattaatagtgatgtgcaagaccatcaagtgaccgtcgatggcgatctattgggggaactgctaaataaaaaaaccgcctattatgataaagacggtgaggaacactataatattatttcggctttgcataagtcgatgcgcaatagtgatgtcgactcagcgatttattggttggggcggatgattgacggcggcgaagacccgatttatattgctcggcggctcgttcgttttgcgagtgaggacattggtctggccgataacaatgcattgaatttagcaatgaacgtctttcaagcttgtcaggcgattggcttaccggaatgcgacgtgcatttaacacagtgcgtgatttatctatcgcttgcgccgaaatcaaacgccacttataaggcgcggacagcggtgcaaaaggatattaaaaagacgattgatgaacccgtgccattgcacttgcgtaatgcggcgacgaaattgatgaaggaagtcggttacggcaaaggatatcaactcgcacatttctacgatgatagattgaccacgatgccaactagaccagagagtatcgccgaccatatttattaccggccgaccgaacaaggcaatgaaacgcggatgaaacaacgtttgaattacattaatgaatggaaacaaaagcacaatactgattttcaagataaataaaaagtcgcagtcatttgactacgactttttaaattaagcttcttttgccactggacgccagaggcctaagattagggcactgacaaatgttccgattaacacggcaagcacaaagagtaggccgtggttggcaagtggtgccacgaagatcccaccatgtggtgcagggacagtgatttgccataattgggttaaaccaccaccgattgctgaaccgataacacttgaaacaatcacgtgtaacggatctgatgcagcaaatggaatggcaccttcagtaatgaatgaaatccctaatacatagtttgcgaaggcttgtttccgttcactaccggtaaatttgtttttgaaaatagtagcagcaaccgcgattgccaatggtgggaccatcccaccagccatgacagcggccatcaatgaaccatctttggtggttgtgaagacaccgattgcgaaggtataagcagccttgttgaaaggaccgcccatatcaacggacatcatgccacctaaaatcgcaccaagtagtaatgcgttaccagcccctaagtgtgttaagaaggtactcaaccagaggttaatttgagcaaagactgggttgatcatgaagtacataataaagccaacaatcaatagtcctaatacagggaatattaagattggttttaaaccatcaagggtttgtggcaagttcttgaagactttcttcaaaccaacgatcacccaaccagcgatgaacccagcagctaaaccgccaaggaatccggctggactctttgaagcaaggacactggctgttgcttggctagccatgtagcccccgacaaatccgggcattaaggcaggccgatcaccgattgaaatcgcgatgtaagcagcaaggaccggaattaagaagttaaaggcattattgcctaatgagttcaagaaaataaaagtggttgaatgtgcgccaacggtttgttccaaaaggaatgagatggccatcaagatcccaccaccgacaacgaatggtaacatgtttgaaacaccattcattaaatcttggtagatgcgactccaaagggttttcttgtcagctgaagcttcttcgcttgattggctttcagttgcgtgatagattgagccttcttcatccaatgttttttgaatcaattcagctggtttcttgatgccgtcgatcacgggacggttcaagagatgtttaccatcaaaacgaggcatatcgactttcttgtcggcagcgatgataacccctgttgcgcggttaatatcgtcagcggttaattggtgtttaacgccttcagaaccgtttgtttcaactttaatgtcgatgcccattttagcagctgtttctttcaaggcagcttcggccatgtaagtgtgggcaatcccagttgggcaggctgtgacagcaacgatgaatggtttttgatcatcagctggcgttgcggctgcggcttgtactttagcggcttcttcagcttcttccttcgcatcttctgcgtctttagcagcttgagccttagcaaagagcgtttgcacgtcttctggtgtttgggcttgtttcaaatcagcgactaattgtgggttgattaaaagggatgaaagaccagccaaggcttgtaaatgcgtatcgttagcgccttctggagcggcaatcatgaagaacaagtaaacgggttggccgtctagtgcgtcatattcaacaccgttttgacttttagcgaatagcacagttgcgcgttgaacggcactgtcttttgcatggggcattgcaatcccttcgccaattccagttgatgattgggcttcacgagccaaaatatctttacgatagagggcgtcatctgtgataacaccgatgtctttatagcgggcaaccatttcatcaacagcggcttctttagtcgttgcttgtaaatccatgatcatcgcatcttttaagagtaaatcttggatgttcataataaatctcctttgtatttaaaattaatcaacttgtgtgatttcaatttgaggtaagagttcgttaatcttagcgctagtggctaaatcttcagaaaaggcggtggcactaccacaagcaagacttgttttaaaagcggcgagtgcatcgtgatgttgtgcgaatgtgccgacaaaaccggcgatcattgaatcaccagccccaacggaattaatcactgtccctttaggtgtaccaccgaggtaagcgtggtctggtgtgattaaaagggcaccgtcaccggccattgagaccaagacatgttgggcaccttggtctaataatttgcgaccagcggcgatgatttcactttggttggcaaagtgtgtgtcgaacagttcggccaattcgtgatggttgggtttgatgaccaatggtttttcagccaatgtgtctaacaaagcttgaccggttgtatcaattacaaattcagcgttgtgcgcttgaatcaatgggattaagtctttgtagaaactagccggtaaattaggtggcaaactcccagacatgaagacaatatcgccagcttctagcttagccagttgttgtttcaagttggcaacggcttctgctgaaatgtgtgggccttgaccgttaatttcagtttcttcagtattgtcttttaacttcacgttaatccgggtgtcttcttcgacttcagtgaatcgacagtcgatcgaagcgttgttgagtttgctttgaatgaattgaccagtgaagccaccgacaaagccgagggcaacgcttggtaatgctaattcggcaaggatgcgtgaaacgttaatccctttgccaccggggagcttaacgtcagattggacgcggttcacgttaccggtatttagtttttcaagttgaatgacgtaatcgattgatggattcgccgtaatcgtataaatcaagataaaacctcctggatttctgtgtgtgaatgatagtgtttgtaaacagatggtgacaattgatcagtaatcaattggacttgtgccaatggggcaaacttactgaacgaaacagcgtcgaattttgtgtgatccgccaaaaccatcgtttggttcgcttgttgaatcgcaaagcgctttagagtggcttcttctggatcaggggtggttagcccagcttcaacatcgataccgtttgtgccaagaatcgcctgattgaattggaattgcaaaagggtttctaaagcagccgcaccgaccatcgctttggttttgctcttaacacgcccacctaatagaaaggtttgaatttggtgatcggctaagagagaagcggtatcaaccccattggtgacgaccgtcaaattcatttcaggtcttaagtaggggatgattgcctgggtcgttgtgccggcatctaagtaaatgacgcagccttgttggatttgtgctgcggcaaacttagcaatcgcgtttttttcatgaacgttcttgccgtttttttcaatctggccaagttcttcttgtaacgtgttgatgcgcttagcaccaccgtgaattcgagtagcaagcccttgttcttcgagcaattgcaagtcacgacggacagttgattcagaagcgttcaataactggcacaaagattgcatcttaacgacgtcttgttgctttaaaagttgtaatatcgcttggtgacgttcttctgttaacatgacaaaacctccgtagcatcattatgacatcgtttccattcaaaagcaatcgaaatatttcaaaaacgttcaaaaaccatcaaaacgctgatatagacctaaaaaaagattggtgcgttagtgagcaaactgcggacaatgccagaaatagaccagtttaaaagtaatgtaagagttttcaaaagtgcttaaggtatgctagactaatagatgacagagtggtatagcccaattattaggaggttctattcatgggaaaactaggcgtttcaatttatccagaacgatcaacttttgaaaaggatgcggcttacttagatttagcgcatcaatatgggttccaacgcgtctttacatcattattggaagtgtctggcgatcaagaagccgtgttaggcaactttaaacgggttgtagcccatgccaaccaattaggaatgcaagtcatgattgatatcaatccgggtttgttcaagcaactcggtatttcatatgataatttaagctttttccatgaacttggtgcttggggaattcggttggacaacggttttaccagccaagaagaagcggaaatgacgcgcaatccgtttaatttaaaaattgaaattaatatgagtcaagggacaagttacgttgataacattatgagttattcacccaaacgagaaaacttgttaggttgtcataacttctatccacatcggttctcgggattaggtgaagacttcttcaaacaatgtacggcgcaatttgcaaaatacaatttgaatacagcagcgtttgtcaattcacatgaagcgactttcggaccatggccaacacaagatgggttgcccacgatggaagttgatcgcgatttaacgatggcaacgcagatgaaacattacgttttaatggataacattgatgacattattgtcggtaatgcgtatgcttcggaagcagaattgaagacgatacatgacgtttttaacgctgaattcccagcaatcgcaatcgacgtcgcagatgacattacggctgatgaacgcaaggtcctctttgaaagtctgcatagttatcgtggcgatcgttcagaatatcttctacggtcaacgatgacacgggtcatttttaaagacttgcctttcccagtccaccatacagttgacatccaacgcggtgatattttaatcgataacgtcggttacggtcagtataaaggggaaacccaaattgccctcaaagccatgccaaatgacgggcgcgtgaatgtggttggccgtattacgcctacagaattattcctattagactatttgaaaccatggagccaatttaaattggtgccagctagccattaattaacgaataaaaagcgtactgattgaggtcactcactcagtgcgctttttatcgatgatagagccaattcagtgtttaaccagttatctgtttacttttaatctttttttcggtagtatataaggtactgtttaacgatgagaaggagtcaaaatatgtttgtagatcaagtcaaaattgatgtgaaagctggtaaaggcggcgatggtgcagttgcatttcgccgtgaaaagtttgtgccacttggcggaccagccggtggcgatggtggtcggggcggaagtgtcattttagtggtagatgaaggtctacgaacattaatggactttcgttaccgtcatcactttaaagccaatagtggtggtaatggtcagaataaacaaatgtacggccgcggtgccgaggatacatttgttcaagtgccacctggtacaacggtgcgcgatgctgaaaccaatgaattactcggtgatttaaccgaagatggccaacaattagtgattgctaagggcggtcgtggtggtcgtgggaatatgcatttcgcaaatgcccgtaatagtgcgccggaagttgccgaaaacggtgaacctggtgaagaacgcagcattcaacttgaattaaaagtgcttgctgatgttgggttggttggtttcccatctgttgggaaatcaacgttgttgtcagtggtgacaagtgcgaaacctaagattgctagttaccaatttacaacgttggtccctaacttagggatggtgcaactcgatgacggtcgggactttgtcttagccgatttaccggggttaatcgaaggggcttcagacggtgttggtttagggattcaattcttacggcacgttgaacgaacacgggttgtcttgcatttaatcgaaatggacgatcaaacgggtcgcgacccatttgaagattaccaacaaattaatcacgaattagagacctatgatccaaaaatcttagaacgaccacaagtgattgtagcgactaagatggatttaccaggttcttctgaattattagccgagtttaaacaaaaattagcagctgccggcgatacacatgagatttttgaaatttcaagtatcacgcatcaaggggtgcaatcattgatgaacaagacagctgacttattagctgaaacgactgaattcccaatgggagacgtcgaagaagttcaaacgcaaaaactttatcaatatcaaccggaagcacctgctttcatcattgaacaagatgaatacggcacgtttattgtgtctggtgacaaggttgaaaaactcttcaagatgagtaacttggatcatcaagatggtgtcatgcgttttgcccgtcaattacgttcaatggggattgacgaagccttacgcgaaagtggcgcacatgatggtgatttagtggcaattgataactttacgtttgaatttgtcgaataataggcacgtcaagaaaggaagacattcatttttgaatgcttcctttttctatgggatgcataaaataacagggcttaatgtaggcacatcactaaaatattgttataatagcagttattagaatgtagagtaggttgaaaaaatggcgggcaagaagcgtttaaagaatagtcgttacattactggctttgatggtttacgcgcaatcggcgtgattggtgttattttataccatctgatgccatatacttttaccggtggttatttaggggtcccaatcttcatggtggtttcggggtatctaatcaccgatttattggttcaagagtgggaacaaaatcaatggattaatttaaaaagtttttacttacgccgggtaaaacgattgtaccctgggctgataacgatgctgtttgcaacgggcgcgtacatcacgctttttcagcgggaaatgttacagcaacttaatcagattattatcacgaacattttatacgtttataactggtggcaaattggacatggtcagtcgtatttcgatcggtttgccaataatgagtcgccgtttacccatctgtggacactatcgattgaagggcagttctatctaatttggccttttatcgttgtggccttgattattggtcttaagaataaaaatcggattgcccaagtattactagcagtcagtgttgtttcagcaatctggatggccattttgtaccaacccaatgctgaccctagtcgtttgtattatggaacggatacgcgggtcttttcaattttactaggagcagcgctggcgtttgtttggccatcaacagcccttaagcaaaagattgtgcctaaacaacgcctcgtcctcgatggcatcgggttagtgagtgtcctcagtttggtttggttaatggttaagttgaatgccgagagtagtcttgtctatcgcgggggactatttctgtttagtgctttagtctgtgttttagtggcagttgtcgctcatccaggcgctgattggaatcggttattgacgaatccggtctttaactggttaggtaaacggagttacgggatttatctgtatcaatttccggtgatgattttctttgaaacaatcttcaaaaatatcgctgatcacccggttttatatccagtgattgaagtggcgattattttcggattgaccgaattatcctaccggtttattgaacagccactagcacactatccgtacaagcagttatggcaccaattgaagcaatttatgcaccaaccacattggaatcgggtggttggtcgagtgactggactcgcaattgtctttttaatcgggttagtcggggcgtttcaagcgccattccaaccggcgccagatacgcataaatcggcattagcggtcaatattaagcaaaatcaaaaagctaaccaaaagcgtaaagatgcgttgattaaaaaagcaaaagcccagaataaagctggacaagcaaatggtccaacttcaaaagctgaaaaagcggctgaggcggctgcgcaaaagcatccaatcaaccaagaatttgaaaaatatggcttgagtcaagtgacgattcaacgggcccagaatatctcggtgactgcaattggtgattccgtcctactcgacggtagtcaagctttacagaagttattcccgaatatgttggttgatgcggctgttgggcgccaactctatcaaagtattcaaattgtaaaaggttatgatcaaaaacaagcccttagcgatactgtactggtcagtctaggaacaaatggcgcctttacgcaagaacagatggcgcaatttatggcagccattgggactaagcgaaaagtctattggctcaacgcgtttgtcccaacgcgtccttggcaaaatgatgttaaccaggcgcttaaaaatgcaactaaacagtatccaaacttaacggtgattgattggtattcacaggctgccaaacacagtgactggttctaccaagataaggtgcatccgaacccaactggggtcaatgaatatgccgccattattaccaaagccctcgcggcaaaataaagcgttgaattaaagacagattggaagagctaaatggaattagaatttttaggaacaggcgctggagttccagcacgacaacgaaacgtcacaagtgtcgcattgaaattattggatgaacgaaatgaagtgtggttgtttgacgtcggtgaagcaacgcaacatcaaatcttaaaaacgacattaaaaccgcgcaaagttaaaaagatctttctcacacatttacatggggatcatttattcgggttaccaggctttttatcaagccgatctttccaaggtggcgacgaaccacttacgatttacggccctaagggaactgaagaatacgtgcgcacgagtttaaaaatctctgaaagtcatttaacgtatccattgaactttgtcattcttcctgaagaaggtgttttgattgatgatgcgactttccgggttgaatgtgctaaattggatcatcggattgccagttatggttttcggattattgaaaaggaccatccgggggaactgcaagttgagaaactgcatgcagatggtgttccggctggtcctgtatacgcaaagattaaaaagggagaagtggttacactcgctgatgggcgccaaattgatggcaaagattacattggacatgctcaaaaaggacggattgtgaccattattggggatacccgccaatgtccaccaattgaacgcttagcggctaatgcagatgtattagtgcatgaagggacctttggtaagcaagaacaaaagattgcgcgtcaatatttccattcaactaacattaatgcagcaaaggtcgcaaaagccgcgcatgtgaagcggttattattgacccatatttctgcccggtacctcgggcaagcagtgcgtgatttacaaaatgatgcccgcgatatttttaaaaacacaaaagtagttagtgacttagatatctatgacattccgtttcatggtcgaaaggagtaaacagatgactaaattagcagcattgagagatttaaaccgtaaaattgtggtgattaccggcggctcgtctggtttaggacgagcgattgcctatgaagccgctagtaaaggggcaattatcgtcgttttggcccgtcgagaagctgaattggcggcggttcgcgaagaagcacaccggctttcaggacagccggcgtatgcatatgtcctcgatgtcagtgatccagcagcgattgaaaccattgtggctcaggtgcaaactgaagtcgggattccagatgtgttagtcaatgctgctggttttggaagttttgaaaatgcattcgacacatccatgaccgttgtggagcagatgttccgggttaatgtgctaggtttaatgtacatgacgcgcgcttttgggcggatgatgattgaacaaggtagcggccacatcattaacattgcttcaatggcgggcaagatggcaacacctaagtcggccatctattcggcaactaagttcgcggttgttggctattcaaatggtctacgcttagaattaaaaccatttggggttcaagtgactaccgttaatcctgggccgattgatacagctttctttgatattgcggataagaccggtaattatttgaaatcggtcgattgggttgttttagatcctgatcaactagcttatcggattgtgaaaacaatcgggcatgcaaaacgtgaaattaatgcaccatggttgatggcgatcggtgcacaattctatcaactggcaccacatatcggagactatgttgccggtaacttattgaataagaagtaggggggcagttttataaaaaaacaaggtcgattaattacagtattggtcctagcattaattgtcgtaatttttgctgttttaaacgttgaaccagtcgccattaactttggattcacccatgttaaatggccattaatcatcgttattttggtgtcattattgattggcgccatcattaccttcttggcagcgactggcagcacgttgagccaacggaaagcacaaaaggaaatgaccaaagaagtcactgaattacgcgacaatcaagctgctcaaattaaagcagcggttgaagcagaaaaaataaagaatcaaaaagcatttgataaagcgttagcggataaggaagctgaagtccatgaattacacgcgaaaattaatcaaatcacacaaacaagtgatcatcataatgcatagaaaaagaggttgactgttaagtaataattgccgttatccgctactaattctagtaggtagtattggtaacaataattgacatctaagaattcgttatgaatctccacctattttcctccactgactactttgttcgttcttggtacgcaatctgaaccactaattgatagggatcattgccttcaaccacgccactacgcccggccatcttgttcgggccacccgtaatccaagtatgggcgactgcaagttgataatcttgggctaggtcttggattggggttaagccaaccgtcgtaatctgcgctaacggttgtttggcaatggcgttaatccccccatagagtacccaacgatctgcttcttgtttcatttcataaaacggtaaagcaacttgattcccaatcgcataaattggtcgctgcaattgttgcgcttgttcatatatatcattatcacttaagcctgcgtaattcaagctaagatagccagattcaatcagttcgttaatcaaggatcctaaacgttgggtttgttccgcgtccattgtcagttgcgcgggcaagagattttgttcttcaaataagccagtggccggttgaatttgtgagatcacttgcgttttggcggttaccccatttagtggatgtggcgcgtttggatcaccacccagcgctttttcaacatacggtgaaatatcgatgaccgcatttttgccccgataatagaaatacaggttcatcactgcaaaatagaataacaccaaaaagacgaggaggttaatcacacctcgtccaaccgcttgagctttaaagtaggtcacactcttatatagaagataaaaatcaccaattaaacaaataactgaaaaaaggcgatttttaacgcgaccattaatatttaagtaaccgaaataatggttaataatgtctaaaaaagttaacacgataaatgtcccccttattgcgcgtaaaacaaattattactgcgtagcagtggcactgctactacttgaaaccactttagcgctactacttgtgttagcagagctactgcttgccgtggtcgtgttagctgactcatcattttgtggtgttgttgtctgctcatcatcagatgattgtgagttggcatccgtatccgtccgatcctgacttgaaacagccttagaagaggaattaacggttgattcagaggtcgatgaggattccgattcagactcagattctggttctgatgtattcatgctgctggttgaacctgtggttgcactactacttgaaacaaatgacgactgctctgtcttggtgttttcaacaggtttaaccgtatttgccacaatgttggtcgcactcattgcgataattaacgaaataatggcggctggtggaataatgggtggtgtgtgatatgccattttaacgctccctttctattatgcttggcagtcttcacagaggccatagagttcgaactgatgaccttcaatttgacaatttggaatttgctgactaaaaaaatctaacggacacattttcaattcaatcactttgccacactggcggcaaataaagtgatgatggtggcgatgttcaaaatcgcattgatatttaacgtgggcctgttcaccctctgtttgttgttctactaagccaagttgttcaaaatctttaatgttgcgataaatcgtattgtgactcattcccggaaaaatggcgcgcatatgctcgtcgatttgagtcacgggaatgtagcgattttcatatcccgataaatactgtagcatctctcggcgttgcttggtaattttgtacccatttgcgcgtaatacggcaatggcagtggttatttcgctcatttaatacatccgctcctctcgattaatcgatacgccattctagcacatgctttctaggttgtcaggcgctggcgcttgttactaccaacttcaatttagttgttaccccacactatttaccattatacccttaatcccataaccgttagctaagcacaactaaatttcaccaaattttaatgaatccgaatacaaaatagttgcattatctcaggatgcgcgttatgatgtaattcagatgatttttaagaaatcgtcttcattagccttctatcagtatttatagtcatttgaagggagattttacgatggaatttactagtcaaactaataattggtatcatgtttcacttgatacgcaaactcaaaaatttatcgcaactgcaacgaacaatgaaaaaatcagcgcaagtggtattacaattgaacaagccgtacaaaaactcagttataaagtgaaacgaaccaattcggttaaccaacactcatttgcataagggttaaccatacgttaaaaggaagcctgtcgaacgcgttcgacaggcttcctttttattttcaatgatcaattttttagggttgcgattaatgttgctaaggcttgcttagttgtttcccagtcatcgttaaccaacacagttgcccgttgatttaaatgactcggtaacatcagatcccgcttaaattcagcactttgaatccgtttttgaattgcttcaggactatccttccgtttttcaaggcgcgtaatcaacgcatctgtttcagaaaccgttaagaacaagaccgatgcttcttcggggaacgtctctaaataagtctgtgcccctttggtatcaacaactaggctaatcagctgtgctttttgccacgccaaatctaacgcttcatgtgaagagccatattgatagccagaatagctcaccgattcaacgaggtgcttttgtgccaaggtgtctggtgtttcaaaataataatccaccccgtcgacttcattatgccgtctaggccgcgtggtatgggtaaccacttgtggaatttgaaaggcctcttttaaataatggctcaccgttgttttgccactacccgtggcgcccgtaatgactaatagttgttttgtcactattcattcacactcttctattcaggatttaaataaataaaaaagtttggcggcttaatttaagcagacgccaaacttttttattcttttatttaatcttataaacgacgaccaaagtcaggtttgtaatattgcattgacatcgttgttacattttggccttctgttggtgcgtgaacgtatgagccaccaccgatatagatcccaacgtgatgtgctgaaccaacgccaccccagaaaacaaggtcaccaggttgtaattctgataatgacacttttgtcccaaccgtgctttgttcttgtgatgtccgtggtaagctaatgccggccatcttagcagcgtaccaaactaaaccagaacaatcaaaaccaccaggttgtgcgccaccccatgcatacggtgtgccaatgaattgtaaggcattgccaactaatgaaccagtgtttgcaccagatggcgcaactgtcgttgtttttgcaggcgttggtgctggtgtattgtctgaacctgttttaggtgcaaccgttggtgcgattgttgctttttcagtttcttttttagcagcttcaacagcggctgctgtttgagcatctaattgactttgtaagctagcaagctgtgtcttatgtccatccacttcttgttggaaacttgcttgttcattttctgcatctgctttaagtgatgttaactgtgcttgatctttttctaactgtgcttttgtgttaactaagtttgcttttttagtcacttgttcttgttttaaagtagctaatttactttctgagttcgctacggcgtccattgcttccttgttagcttggtttaacttgccaacaactgaagcacgactgaccatatctgagaaactatcactattgacgatgaagtcaacgtaaacatttccagaaacactatccccagcacgtttttgaagcgcaattacttgttcttttaaaacagcttttctagattggacttcagcttgaactttaacgattttttgagccacttcagtaatttctttgtccgttgatgcaatgttcttttgtgcatcatcaattgcaacggtcttatttgacacttggctatcgattgaagcaaccttatcttgtgcagcacttaacttagctaataaagccgagttttcagcactaaggtttgtcattgatgcttttgtatcagcaacttcatcggcactgactgcaccaatgctaaccgccattgttgacccaattgttaagaatgctagtgcactgaacattaatcgactgacttttttcactgaatgattcccctttatcatttttaaaaatacttaacttatgtacggttttccaaccaagaacaagtgtaacattcaactattacagaaatgttacagcttagttaccgtattaagtctaaatcgggaattcacgctacttgttagcggttaacgcggcttggattttgacccattgctcatgacttagcaaaaccgcggtttcagtcccacttgcatcgacaatttcataaacgagcggtttgacattgacctctttgataatttggttcagcatctttttagcgtataaggcttgaatttttttacgtaacattttctatactcctcgagcgtgattaattgtgttctcagcacaatcagcttagaataaaagcatcttttattatgaaatgaggtttatgcaaatgcaaatcacaagacatgatcaaccactcgatacaatcggcacaccaccagccgtcggcacacagttaccccaatttgaccttaaaaatgccgctggcgaaacggtgacttctgcgcaattgctcggtaaacggactttaattagcgtcgtgccagacattgacacccgtgtttgcagcattcaaacaaagcattttaaccaagccgtcgatcaattcgaagacgtccatttctacacaatttcaacaaacaccatcgaacaacaaaataactggtgcgctgcagaaggcgttaagaacatgcaactcctttctgatgaggcactcagtttcgggaaaacaatgcaactctacgttccaagcaacaacacgcttcaacgctcaatctttattttggaagcagatggtacaattagctacaccgaattaattatcgaacaaacagacgaaccagattatgcagctgcattaaatttcttaaaagcagctcaataacaaccccaaaacgatggttagaactgactcagtttaaccatcgttttttttgcggttattatgtaaaattattcacaacacccttgataaaacctgagcaatattgctccaccttatgaaatgacgtattatacccgtattagcatctcaaattaaactttattaaggagtccccatgaccgagctatctaacgagcttttccaaactttcaataaggtgattcaccattatcgccattattatggcatgcaattttcatccgatcatcgctcagtcagccaaattcgcattctaaaacgccttaatatcgaaaacggacaaatgcagggagccctcgccgaaagtctcgatattcggccttcatccctaaccgaatgcttgcacaaattagagtctaaacactacattaatcggcggcccgatcatcatgatcggcgaatcacccacgtcttcattacagcggccggtcgagcggttttaaaagaagccctcgatggtcgcaatgaatttacggagactttattcggtagcctaacccccgacgaacaacaagcgctcaacgaacttctaaataaattagaagatacgttagccgacacacaacattttgactttatggctgaattcactaaacgcctcgcccaaaccaaactataatcactggaggaatcgtaatgcgcaagatacttgaatatggtttagccggtgtggtcgcctacctcataagtcgctacttcgtgtggcacattgtcttaccaacactcaacagttatccacgcttaacccgggttatggcccgttttccagcaacgacgctttttctgattctatttttaacccttacattttggttgggctgggtgcaatgggaccgccgacaactatcgccaatctatggttatctcgtctacagcgtctatctgctcttattattcattgtcttattcactaaagcaaacgtctatcatgcagttagcttgaacccgttcgatttcattcaaaaggatcacaaaacactgctcgaagccgcactgaatgtcgtttacttcatcccattaggcggtttgtaccatttgaaagcctcatttgttgaaacgaacatcatagcgctcttaacgattctaggcattgagattctccaattcgccttttatctagggactttcgcactcagtgatatcctcttaaactggtttggctgtttaattgggtttggcctttggacacttgcacaacatcattttacagtccaaacaaaaagcagctaggcattaagccaagctgcttttttaacgattgagcgtaattaactgcttataaagttgattcgttagaagtccgattgaaggattggccttatattgattcgataataagacaattcctgaacgcccatcctgactcatctgcaagctagattcgaatccagattcgactccgtggcttgtaaaataatctttgtaattataaacaccacccgtatattcaccagtagtcgatgagcggagcgtttttaataacgattttttaaaaacttttccttgaacaatcgcctgttcagttcgaaagaggctactcgttgtggcatacatatttccggtccctaactcacgcatatatacgtaacttggttcactaactggcgtgccatagccgtcttgttgataaccataagcagtcgcttgttggccggtcgtttcatttggcataaaattaaacgatgttaatttaaacggtattatcaactgatttccaactaactctcgataactcttatgggtgacttgttctaaaatcccggccaaaagaaggtaattaactggcgaataattatgctgaccaatatctttaacagccaaatgatcaagcgcatattgaatccgcgcttgatctgataattctttttctggtgcagataattcagtcagtccagaacgcatatcaaccatcatcttcagcgtaatttgatccgcctctttaatctgcgggtaataccgacttaacggtgtcgctaaatcgatgttcccggcttgcacctgtttcatcaataacgcagccgttaatgacttttgaatcgatgcaatctgatacgtcgtctgtggagaattcagttgcttagtcgcaaaatttgcatagccccggccaccttgaaataacacatgattccaccgcacaattaaaatggtcccgctaaaactgttatcatgtagcaactgctgtacaaattgttgttccttcgcactcaaatgattgatggttcgatcatcaatcccggcttcatgactttttgccttttgaatggctaactcaagttttgttgcctgtaattgttgctgaagttgtttcattttttgttgggtttgttgagtttggacggcatatttttgccgttcatgataaatcgtgccgccaataattagtaggatgagccctaccaacagcagtcctcttttcaatttgttgtccatccgcttagtccgctaatcgtcccttctcaatgactaccatttgagcatcgaatcgataatacagtgcttcaccattttcaacttccacaccatcaatatcgcgatctgaaatctgttcgatcaccttaatgagcgcacgcaaagtagaaccatgcgctacaatcaattggtcctggcctgcaagtaatcctggcactacttgatcttgccaataaggtaatagccgttgcgttgcctgtgcaagactctccccgcgtggccgactcatcggtggaactagtcgataacgacgggcctgcgaaaaagtcgtcaataaaggtgggaccgccgtgtaactacgccgccagcgggcaacttgatgcgcaccaaaaatagcccgcgtcttttccttatttaacccgcgcaatgccccataatggcgctcatttaatcgccaactcttcgtcattggaatggccaattggtctatttcatccagaataatgtaactcgtcaaaattgcacgcttcaataacgaagtatgcacatgactgaattgaattccggttgcttgaatttgtcggcccacatgctgtgcttgtttgcgcccagcagccgttaatggcacatcagaccaaccagtgtaagtatttaattgattggctaaactctcgccatgtcgtacaattactaaattcgccatgcgttaaactcacttttcctgtcgtttaaaataatccctttcagtataccacgaaccgtttcccgtgataaataacgcgtcatttccctaatttaaaagatcatttaaatagttaaggaactgtacagtttcgttgtcatctaccaattaattgtagtacaatgaatctattgaattctaaggatgtgcgatatgtcagctaaagcaaaagaattttggaaatccactatacaaatcattttattagcggccgtgatggtcggcattgcgcaattactgctcaaattcgtcattgccaatgaacaaattttcgggccatcaatgcaacccaactttacacagtatgatcgggtcattgcactacgccatacgaaactgaaacgcggcgacgtcgttatcgtcaaggcccctgattcaccaggtgaattctacattaaacgaattgtcggcatgcccggtgaaactgttcgcttcaacaaggatcaactctatattaataataaaaaagtcagtgagccttatttaaatgactataaaaaagatccaacaaccttcctagccgggtcaaactacttcacactcaacccaaagactaataagccaaactttgatttaaaggacgtgcttggtcgttccacagtccctgcccaccactacttcgtcatgggtgataaccggactgtttcaaaggatagccggtatgaagaagtaggctttgtcagtgatgattctaaaaccttcaacgggattcaaggcgttgtcaaactccgctactggccagtaacgaaatttaaagtttactaatcacgaaaaaaggtccaccacgattgtggcggaccttttttgaccgtttttttaaagatagacactaacaccgagtaaaataattgctaatagaccaataatcgccattaatggccaaacgaattttaaccacttatcaaacgttacatggaccattgccagcgaggccaagaccaaaccagttggtgtgataaacgacataatgccttgtccccagttataagcactaataataacgtcacgattaacaccgactacatcagccaacggtgccatgacgggcattgatagcaccgctagaccggaactcgacggaatgaagaatcctagtagaatgaaaacgaagaacatcaccgttgagaagataacaccactcatatgggaaacgccactacttaaccagtacaatagcgtatcactaatttgtgcctgttccataataatcgtcacgccgcgtgctaaagcaatcacaagggctacacctaacaggtcggaagcccctgcaacgaattcactaacaaaatctttttccgataatccggaaataaacgccaaaataaacgtaatcgctaagaataacgaggaaatttcattaaatagccaaccccattccttcacgccgaagaccatgatgacaaaaccggccgcaaaaataattaacatcaatttcttccggaaatcaaaccgtggtacttcattgacatcactatttcccaggaaatgtttttccaattctgctttttgattataaatgagcgattggcttggatcctgttttactttttcagcataccgaatcgtgtagaaaatacagattaatgtgcctagaatcagcattacaagccttagtcccataccatctgtaaagctaatgccagccgtattagaagcaatcacgacggaaaatgggttcaccgttgaagccattgtcccgattgaactgcctagataaatcgccgcaattgcgactagcgcatcgtagccagctgccataaagattggcactagaattggatagaaagcaattgtttcttcagccaagccaaaggtggtcccgcctagggcaatcaagctcgttacaatcacgattaaccaggcttctttacctttcaaacgtttcgatagcgccgccattccggccgcaaatgcaccggtcttattcacaacgcccacaatcccacctagaattaagacaaatgtgataatatcgattgtttcagataacccttgaatgggtgcgttcagaaattgtttaatcgcgccaaataagtttggtttatgttgattgagtttttgatatgtatttggaatcgcaactggtttatacaccgatccatccttaaacttcgctaaatccgtattaacatggtatttcttcagtgttgcttgtgtcccaggtgctgtcgattcatgcccattgggtgtgaccacagtgaagttttcctgggtcgtgttatattgtaaactcgcatattttccggctggcataaagtacgtcaagatcatcactgccagtaaaacaagtagaattactgtgtaggcgctcggaaaagtaaagtgttttttcttatcagtcattcaatagcctccatgacgccctccatcgctgaagagccattttataaactcaattatatcacaaaggacgcttgcgctttttccataacacccttgcacagactactttcctgtgctaagattggcaccaagcaaaataagggacgacagagagcgtcctttttggaggaaaactgaatatgaaaactattacggcacacagccaacatcgattaacaagctaccagactaaggtggtcgcctcaacaacggccggcttcggtctcgaaaacatggacgttatgttcttgtctttcaccctatcgtccatcattgcagatttacatctcagtggaacacaggcgggattaatcgcaacgattaccaatattggaatgttgttaggtggcgttttttttggcgttttagccgaccgcgttggacggattaaaacattcacttacaccatttttatctttgcttttgcgacagcggctatgtcatttgcccacacccttcccatgatttatctctgtcgcttcttagctgggatcggtgctggtggcgaatatgggattggcatgacggtcttagccgaatctttccctaagaaacagctcggacgtgtttcatccttcgtgggtgtcgcaggtcaacttggcgctattgccgcggcacttctagcagcgtgggtcttaccacaatttggttggcatgcactatttctattcggcctattacctgttatcattactttttttatccgccatcatctagtcgaaagtacaacgttcacttctgaatcagatcaaccaaaaggtcagattagcgctctttttaaaacacgcgaactagcttaccaaacagttgcgctgatgataatggcaatcgtccaaatcgctggttacttcggtttaatgaactggttaccaaccatcatgcaacaacaaatgcacctcagtgtggctggttcatcaacttggatgttagcgacgattgccgggatgtcagcaggcatgttgactttcggttggattctagaccgaattggtccacggtttgcttttgtcttattcctgattacttcagcagcaggcgtttacatcttaaccttccccaatagcatgggtgctttattgttcgtcggtgcaattgtcggctacttctcaaatggtatgtttgcaggctatggcgcgattgtcagtcgcctctacccatccgaagtccgtgcaaccgccaataacgtgattatgaacgttggccgctgtatcggtggattttcgagcgtgattatcggttggttacttgatcattattcggtgatgaccgtgatgctcttcatttcaacactctatatcatcagcttgattatcatgctcaccatcaataatttaaaagctgatcgctactttaatcatcaataacacacaaaagggtcgagacaattgtctcgaccctttttaaatttataaactaccgccgcgtacctcggctacgttagccacaatcgtaaatgccaaaggatcaacttcatgaattcgattaataatgtgttgataggcttgattttcaacaacgagcatcaacatctgcttattgtcattagaatagcccccagtaacatcaaaaatcgtcacgcccacatcagattcttcgattaaatgggctttaatttcaggtaattggtcgttactcatgacatagaggacctttttccggttcaacccggtctcaatatagttcatcgtaatcaacgtcagaattgatgaacaagttgccagcatgaacgtctcaaaaccagagacgaacacattcgcaaagcagactagtaaatcaactaccagcaaactcaatgccggtttaatattgaaatattttttgaaaattaacggtggcactgttgagccaccactcgaggcatcaattcgatataacaaggcaattccggcagcgtaaacaacactcccgataataattgctaatagtttgtcttccaccaccatcatttggggcgttaaagctaaacaaactggtagcataaaactaccaaagagaattcttaacgtggttttcttatcaagtaagaagtaagcaagtatcagcatgccgatgttaatcacaaacaccactgttgatatcttccaccccatcaattcttctaataagatccccacaccggttgccccaccggctgctacttcatggggggcaaagaagagttgaatcccaatcgcaataatttcgagagcaatcaagatcaaccccatctggataatcgtctgtttcaaattggataagcgcatcgcgtccctcatttctttattgattattactataagtatatatgaatattaatgaagatgcgagtctaaccacttcatgcttcccgtagtgcctgtgcgagtgccactaatttacgagcggtgttggcattccgaattgtcagccactggtataggtcccctttagcaacagtcgaccaccgcgtccgaccgaatgttttcacgggtgcactccagaaaataaacggaccattcacggcaactttttcatacgctggcttaattgcccctacatgtacactcaattccgcccccgttttaggcgcaatcgccacgattaaattatgtttcacatctggcatattgccccaccaagttggtgcgtccgcaacagcttgaatcaactggtcagctgtgaccacggcgatattcacagaaaagccaaaggtctccaccataatctgatcacaagttgccgctaaggttgttaagcctgtttctggggcttcaaataacacgttgccactattgatgtatgtttcacattggtgaacccagccgcttcatacgcagttttaagcacgctcattttaactggccgtttaccacccacattaattccccgtaataacgcaatgtattgcatctgaatccctcacttttttattcatcataacttaattagcttttgttgaccagttcgctttatcactgccatatttattattttgtggggaataataatgaaaaaagttttgcaaatagcataaatacgccatttagcttataatagtatagttataaattttcaaaaaaggatggcgcacaatgaacaatcgaactcaaccgcaaaacatcgccaaaggcatgttttgggcgactatggcgtccgcactctggggcgtttcaggtactattttggaattcatctcgcaaggacaaaagatccctgcaacttggttcctatccgttagaacgcttggcgctggtttaattttattacttatcggggcaattaagttcaaacaagatatcttctccatttttaaatcaaaacgattaacggcttggctaatcgcttacgcccttttcggtatcatgggtaatcaatatactttcttcatgagtatccaaacggggaatgcagcagcggcgactattttacaatatctaagtcctctgtttatcgttattggaaccctcgctttcttacgtaagtggccaaatcgaattgatattatctcattcggaattgctttaattggcgttttcctttctattacgaaaggcaatatccatactttaacaattccttttaattcattaatctggggaatcttatccggtgtaacagctgctttctacgttgtgctaccaagaccaatcgttaatgaaaaatcaccaattctcgttttaggttggggcatgttcatcagtggtttactcttcaatatccaccgaccattctggcaagcaccgccgcgtttaaatgcttccggtattatcgcaattttagccgttattttgattggaactgtattcgcatatctttgcttgttacacagtttaaactttgcaccatcaaccgtaatcagtatcgttgatgccgtacaacctgtaattacatttattctaagtatcatcttcttccatgcccgctttagttgggtagaaatgagtggtgcaattctagttatcctagcaatctacatcttgcaacgttatcaggaaacagaaaatgacgccttagcatagcaaaaagccgtttaaccatcccataagggactgttaaacggctttttaattacgatgcgctatattatattttacttagcttaatcctactcacagctagtagggttctttataggccacgtaaacatcctgagtaacactaagtatctcattagctaatagctgcaggttaatcactactctctcttggaaaaaactgatggtaacaaaaaaggttaaacctttcggccccggttgtttcggaaaagataaaaaaatactcctatgtagaggagaaggccattttccgcaagcataatggttggaataaccattgcgagattggcagcaaacatcattgtcttagggttagcaattagaccaagcgccaataatgataagaggataggagcaataattgccagtccaccaagcaaaatttgtttggaatggtgcgtgcggcgaccgacactaatttcttgaatcccatacattgctaaaacggcaatgtataaatcggtaaaaatattgtttgacagtgcgaggttaccgacttcgaagaagtgttggacaatggggcttcccaagttcataatccaaaaaccaacgagtaattggaacatgtaacgtttttgattccgcgtatgtatgaatccttcaactgccataaagaagaagatggtggcaactggtcgtccgaaccaatcaacccagccagggaccccagccccggcgaacatttggtgcacgtgatcaataaacatgaggataattccaattaccttgacgtcgaagttatttaaaacttgatatgatttagtctgcataatagcctccctaaaagttaagtaagtacattatcgtatgtttagctcatattattaagttttaaatggctagtgacaataatgttagatagcaaaaaccacgataaaaggaatttatcgtggttctgagcttatttagcaatttggcttgtgccatctgcgtaatttaatgtaacgccgtcttggacgttaaaaatgtaagtgttaaattgaatgctgttatccccgacggattggccttccatttgaacgccgcgggctagcagctcattatcgttaaaaataggtgtgacacggtaacgaacaaaacgattagggtgttttttgagataataagcaatatctgattcatgggccagcatttcgggtgcgtttagctggcgtgttcctgtcatcagattctttggattattattttcaccggttagttgatagccaattaaatgactccgattatacagccagccagatttaatccgcttattatgccaaccggtcggattccaagtgagtccttcgcgcttggcagtaggcatcatcgattgatttaaaagaacatttgcagcaccaacgcgatttagtgcgtcgagattactaaaggtttgccaaccaccgtgatcggtagccaaatcagtagcactgaagcttggttggttattattgacgagtacctcgttttcaccacggtaggtgagggccgcgagctctgatgtgttatgacgctcaggactagtcgtttgcatttgttgctgataattagtgagttttttgtttaactggttaattttacgttgaagcgcattaatttgacgttcggtttttttgttgtgcgcattaatgcgcttggtttcttgacgtaaggtggtagcgtgaacggtagttggttgttgcaaaagggttccgacaccagcaagtgaaattgttaccaccacgcgacttatcaaacgggttgctttcattggctaatcctcccatccgcaaagggtatagccttctgcttgtgcttgtgacaatggcatggttgtagtactgttggcacgacttaagccacggcaattgggatcaagatggtattttttaccagaattaggggcaattgtcaccatttgttcaacttgttgagcactagcagcttgttgtgcttgttggcttgcctgaattgcagcctgttgctgagcggcctcgctagcttgactagtagcggcgattgaggctgaagccgcacggactctttctgactcagacgctttttgctgctttttaacaagtcgtgattgactggcaacttgttttgtcagttggctagcctctgttttctttgtagctagttgtttttttaaagcgctcgagttagcacgggccgccttgttttcgcgtacatcaacttgatgttggctggtcttcttggaattcgcagcagccaccggcattaatgaaccgcctaagccgattaaggcgatgatgataatcagtacgcgacgccattttctgggtcgttgccggttaaagaatagtagtgaaatcagtgcgctccccaagaacgctaaaaataaataggacataataacctccaaagtaatgaataacagttcttaacgattgtatattgtacataatatgaaagcaattataaaaagcctaggcgtacctaggcttttagcggttaatctttggttgtgagtgaaacaattgcttttgtttgatagtatttttcaggattggtttcaaaagttaaccaatctgcatcagcgaatagaccagccaatgcaagaattgggcgttctttagcgagttgttgttcgctagaagttgcaatggcgtcttggtagctaccattgaagatttcatctagataaaaggcttgatcatcaccaacgtttaaataggtagtatcattcttccaagcatgtagcaaatccgtttccgaaaaagtaacggtttcgttatttgaaaaagtcatgataaattgcatatgggtcaactccaatcaattaattaagcaacaatctatttggttgcctgcctaaattatagcatttagataataaaaggcgaaccttttgacagtcattgtggttaaaaagtagaatgaaggtgaacaaaatagaaaggaagtcattgatatggcaaacgaagaacgattagatagtttgaaaaatgtaattgaaggcacagttaagaaggttgtcagtgaagtgacacctaataaagataagaaagaaaaggcgcaaaaagctgacaaaaaataggacttagtaatgaagtaaaggtcaaaatcatccgtttggttttggcttttttattggaaagccgttaaatgcgttcgcttttacgaggcaggcttggtataatttaaaggatagtcagaggaagtaggtacaattaatggattacgcagaaatgttagaccggcaaaagcacattcgtaatttttcgatcatcgcgcatattgatcatggtaaatcaacattagctgatcggattctcgagatgacggatactattgccaagcgcgatatgcaagcgcaagtcttagatgacatggaattagaacgtgaacgtgggattaccatcaagttaaacgcggtggaattacactaccatgccaaagatggcgaaacttatattttccatttaatcgatacacctggacacgtcgatttttcatacgaagtgtcacgaagtttggcagcttgcgaaggcgccttattagtcgtcgatgcggcccaaggggttgaagcacaaacgttagccaacgtttatttagcggtcgacgatgatttagaaatcgtccctgtcattaataaaatcgatttaccatctgcacaaccagacgttgttaaagcagaaatcgaagagatgattggtttggatgcttcagaagccgtgcttgctagtgctaagagcgggattgggattgaagaaatcctagaaaaactggtaacggacgtgccagcaccaacgggtgatttaaaagcaccattgaaggcgctgatttttgattcgatctacgatagttatcggggtgttgtgttaaacgtgcgggtttttgatggcactgttaaagtcggcgataagattcgcttgatgaataacgggaaagaattcgaagtcactgaagtcggtgtgatgtcgcctaaagccgttaaacgcgacttcttaatggttggtgatgtgggttatattacggccagcatcaagaccattcaagatacgcgggttggggatacggtcacccttgctgacaatccggcagcagaagcccttgatggttatcggcatattcaaccaatggtttattctgggatgtatcccgtggataacgcgaagtttaacgacttgcgtgaagcccttgaaaaattacaattaaatgatgccgcgttggaattcgaacctgaatcgtcacaagcattgggctttgggttccgttgtggcttcttaggcctcttgcatatggatgtcgtacaagaacggcttgaacgggaattcaatcttgacctgatcatgaccgcaccatcagtggattatcatgtcgatttaaccgacggcacagaagaagtgattgataacccatcagaaatgccagaaacatcaaatatttcagaagttaaagaaccgtacgttaaagcatctatcatggtaccgaacgattatgtgggggctgtgatggaacttgcacaacgtaaacgcggcgaattcgtcacgatggattacttagatacctatcgggttaatgtcatctacaacatgccactgtctgaaatcattttcgatttcttcgatgacttgaagtccaataccaagggttatgcctcattcgattatgaagtgactggctatcgtgcgagtgatctggtgaagatggatattctattgaacggtgaatccgttgatgccttgagttttatcgtgcaccgtgactttgcctttgaacgaggcaaagcgattgttggtaagttgaaagaaaccattccacgtcaacaattcgaagtgccgattcaagcagctatcgggaataaagtgattgcccgttcaacagtcaaggcctaccggaaaaacgtgctcgccaagtgttatggtggggatattacccggaagcgtaagttgttagaaaaacaaaaagccggtaagaaacggatgaaatccgtgggttcggtggaagtcccacaagaggcgttcatgtccattttgaagatgaatgatgaagataccaaaggtaaataaaaaaataaaagcgtgctagtcgaggctgactagcacgcttttttgcgttattgaaaagaaataacagttttaccaacacgttaatggatagcgattgagacgagcaggatgtttggtccctataaaaagccgctccagaaagctattcatgctgcgcgctgttgatgggtgcaaataacttaatgcaatataatgcgctaagtccaacaaggacatatacgatgcgcgaaataatagctgcttgaccgccaaataacatagcgactaggtcgaatttgaatagaccgacaagtagccagttcaaaccaccaacgattaataaagtaagcgcgatattgtctaaggttttcatagtgacacctcctttagtagttaatataacatcctcaaaggtggggaacaataaaattgcttagaccaagttttgtaacttagcaaagaattaagggtggttttttagaagatagattgcaaaaaaagcatgctagtcaaatttgactggcatgctttttggtgtttattgaagcatatcgattagtttcagaaagatcatcatcacgaggatgctgacccaaaagagcacattcgatttcttcttaagttggtcatttttcttttgttgggcgatgaataagatgactgatgaacttaagacgccgattgcagcaatgatcacgatcaataataaaatgagatgttgagcaggtgacatgatgaggctcctttaactgattgattctaaggagcagtataccaaaaaaatggagggacgagaatagtgaatctacctgatgaagcattaactcttggtaagatacatcgtttttaattggttgagatccgccttagtcaaacccagcccgtgtttcaaataaccattaacgccaccatattctttgttcattgtgtcatatgcggcctgtagataggggttacggacggccatcattgcagtgatcgttttaacggctttggggttattgtgagttgccaccttaatttgttcaattgtcttttcattttcggcgcggcgatatttattagaggcgaggtagtcgtccatgatgctcttttgatcaaccccgagggcactgaggactaacatagtaccgaatccggcacgatctttaccggctgtacaatgccaaagtgtcgcaccacttttattattcaataagacattaaagaactgtttatagttcgtgcgtgctgcgggatcagtaaccaatttttggttaatatcaatcatgaaagcttcaccatcaaccttatcgagattcttgaaaaagtcagcttgacttgccgaagtccctaaagacttggtgacatcatagtgattgtagtggacgttgcttaaagcgggatcgggtttagccgcaacttcgctactagtccgtaaatcaacgatgttatttaattgttttccaacggttaacttctgtttatccttcgttgttaaaccagctaattcaccagaacgaattaaccgattggctttaattttggtacctgttttcgtgacaattccacctagatcacgagtattaatcgcaccggctaattgaatgtggcgactcatgttttgtttagggacaaggttggattgatgagctgtcgattgtttagtatttttttgtggggtacagccggctgccaaaagtaataaagttgttgttgccacgtaagggatgattgtttggctcatgcgcatattgattgcttcttgtaaaacgattttttattctttacaaggttaagcataaacaaataatgtaaagtgtttgttgttctagtgaaaataaagtgtaaagcttcgtaatggtttggtaaattcataaaaaaaggcctagtagtggtttaatgatacaatggggttaacttttagatatggaggatgataagatgcatgcaacgcaactattaagtgcaacggtcgaacgcgctcaagaacgattactcgatacattggaacaaatgacagtggctgaggccaatacaatgccgcagccactaattaaatcggtgacctggttagtatggcatactgcccgtgaaatggattatcagattgcggatttgaaagggatacaaccattgtggatacgtgcaggttggtcacaaaaatttgcattagatctacccgatgaaacgcaagattggtcgcattcaccagaagaagcagccaaagtgattatcatcgataaagcattattaattggttacttagcagacgcattgcaattgacgcttgattacctggctgaagttactgacgagtctttattagagataattgatgaaaattggacaccggcagttacccgtgaagcacgcttagtctcaatcgtggatgatgcggtcatgcattccgggcaagctgtttacactagaagaatggtaatggggaaataactgctaggacaggattggaatcggtttaacgaataattagtgaagggtaaaaatagataccgtatggtatctattttttgttatccggcaattgaattgcgtgctactatattaaatgtaattaataataatttggaggaattatcaatgaagacaaaattattttcagtattagcaacaatggtagcaccaacagcaatgacagtggggtcagtatcagctgacgcagttgctccgcaaacatcaaaagccgactttagtgttgttgctaaggatccaacaaacccaacagatcctgaaaatgggacattagtattaaaatcagtaccaagtttcagctttgggacaattgaagctagtgagatttatgctggttttactggtaaagttgctaaaacagctggcgctttagaaattgctgatatacgtttaggcaaatctgactggtcgttgacagctgacatggctcaattcacagatgatgctaataaactaacaggcgcaatattgaatttagattctactggttcacttggtgaaactttaacaggtgctgttaaggacgattctcctgccgttgaagtggttaaaggtaacgggaaacatggtgtcgataatttcaagatggaagcagctacgttaacattagcagcaaatccagcagccgatttagctaaagatgagagtttcacaacaacaattaattggaatctttcatcaacaacaccaactgcaccaactgcttaatcattttactattaaacgcacgaaataagtgaataaagttaacgaagcgattgatgaggggcaggcaaagtgatttgcccaccccttatttttataggaggctacaaagttgttgaaaaagaaaagtttagtttcattgttgagtttaatatgtttattggttgggattggtagcttcacgcagaacgtacacgctgaaggcgctgaatttactgttacagcccaatatcgtaccggccaaacggacgctagtttggaatatttttcaattaaagctgaaaagggacagtcatatcctatcacagtcaatgtgcagaacctaaatacacaggaagcaaatgattttgacgcaaaactggtagctgcttcaacttcaaataacgggacgattgactacacaccatctcaccaaaagatggtcaaaacaaaagcaccgttgttacctgatttagcccctaaagtcgagcgcaaacaaagtttcacgttggctcccggggcttcaagggagatcacttttaatcttaagatccccgataaaggtttcaggggcacccttttagggagtgtttatgttaaaagaacctctaatcacgaagctcaaaagaagggctttgggattaataacagttttgcaatgacggttccagcattgctttcacaaaattttgacaagaacattacgcctaagttatcggtgacaatggcaaaattggaagcaaatggtggtgtaccgaaagttgtcgggcaaattgcgaatagcgaaccaaccatgtttggcaaaattaagctaaatgcgtgggtgacaaaaaagaatcagacaaagaaactctatcaaaagagtgctaataaattatccatggcaccacgctcaacatttgaatatgcaattgatacaaataatcagattttacccaaaggtcagtatacgtatcatgtgaaaatggtttcgggggaaaaaactttcagtttaaaacgcaactttacggttgatggagcagctcgtgaacaggtcaataagacattgattaatccagaaaaaccaggcattaattggtggctatgggggtctttaggaattttactactgctagtaattgctttaatcgcctatctgactggtcgaaaaaggggtgcaggagaacatgacgcataatttattgaaacgtaaccgaattctagttttaatgttagcaattatggttattatattggggataacagtaaagccgacccatgcctcctcagtttatggggggcaaagtgagattagctttactgtgcatatcgatcactcaaaaccgacactcccagatgttggcgttgcacaacctgatattccaaagaatggtcaagtaattcgttatacacctgatggacaagccacaacgactggtcgattaccacagactagtgtgctaaaaagtccatttctcagtttgttaggtatcgcaatcattctattagttattatgtggcgctaccaacaacgtgtcagaagggagacgcaagatgatgcaaagtaagcgtctaatttatgtaagtttagcaatattgttattggggagtagtttcgttagtggtccagcccaagtgatggcggctgaatcagcggcgagtgcatctgttcaatcaagtacgccgacaactgacgcagcatcgacgacagagcaacctcaatcaagtgataaaaaccagcaaacgcagtgccaagtacagctgctcaagtaccggctgcggtcagtactgaaccatctggaaagccaagtaatgcagataaccccacagaggacgggtggagcttcttattaacaattcttagaagaggctttagtagacaacctcaagaggaagaatatattgcatacaaggatattgaccgagctaaattttcaggaatgagtattctaacaaatttaggtaatggtttaggtaaagatataacggttcgtcgttggcattgggatgctactcaagggaaatgggttgaagaccgaagtcagcgtaagggaaaaactgggtggtcacttttctggggtagcttaggatttttagatgttgatagttataatcttgtctataagcccttaatcggacagaaacaggatgtcccagtcggcacatactactaacaattcagtttctcagatggattgctgaattataagacgttttattctcgattggctaaagttgttgtgacaccagaaccaattccggccaccgccattaacgcggatactgataacgcggatggcacaccaaaagtaatttattcagacgttgattatggtgccagtgccatagtcacgccgactaattctactgatgatattagttggcaggcaagcagtaccaaggatttactaaaattcacacctgatgctggacgtaaaacatctgttaaggcgggaaatggtgatgtggagggtgaaaagtataagccagattcgtattatactggaaaattgaataaagatccgaatacaccagggattccagctaaatataaaattgctgcaaagaatgtctctaaagagaaaacggtttatgttggtgggttagcagcctacaagaaagcggcggatctcggtgggacttggtcagttgatggtttgtcagacctagctaaggcatctggtgcaacgagtaattggcattatgaatggcaatttacagatggtgaggataagacaataacccccgctactaatagtggtgtttctaatcttaagggtgacattacaaatttagcgaacttaaatacggaacaaccactaacctttagtaaagatagtactttcatgaaagatgctgcagctgcaactacggctggaaagagttatcgagcacagctaacattaacgactaacgtaacggaagaatcaagtggaagttcaaaaaaagttacgattgtttctaacgaagctgaattacaagcgcaaccagcagttggtaagttgtcattggatcaagtgcctagctttagatctgggaacgtcttatcaaaagatatttatgttggtacaactgctcaggacaagcaatatcaggtcagtgatgggttgaaaatcacggataccagagcaacgccaggttggaaattgacagcgaagatgagtaaaatggcatcaaccacaggcaaacaattaagcagcacagccattaatatgactggcttgccaacgaacgtaggattatctgataatggtactgaaacaccgattatgacggataagatgtcgaaaacatggcaagttgctgggaaattagcattaagtgccaatccaagtattcaacttgcggctggtgatacattctcgagcaacattacgtggactttaaatagcgcacaacccgcagcaccagcggcttaagttgttgattagaattaataagtaaattaaaaaagatgaatgatttcctgaatatcagggaaccgttcatctttttttgttagtcgatatatttaacagccgtgccataagcggcaactgattgcatatctgttccgattgaaccggaatcaaagcgcatcatgacaaccgcatctgcgcccatttcaagtgcattttggcgaagccggtcgatggctacatcgcgtgattcagtcatcatttcagtataggctttgatttcgccaccgacgacatttttcaatgaagcgccgatgtttttgaagacgttcttggattgagtggttaaaccgaaaacttcaccgagcacttcatattttttaccaggaatagtttcggtggtggtgatgagaattggatttgtcatgattaaagcccttttttagaagaataagattaacaataatgtgattaaagcgggtaagccttgtaagaagaaaattttcttggtggcggtaaatgtcccgtaaagggcaacgatgaagatgtagagcattaatagggcgaggacaatcttgagcgtttggccggctaataacaggttgaccatgataattacggcgcccaacattccgttataaatgccttggttggccagtgccacgcgggcatttggtagtttgacaaagtccagcggcatgtcaaaagctttcgcctttgtttcagcactggcaaacatttccagccccatgataccgatgtgttcaacggcgattagataagttaaaacaagaatcaatacttgcataagttagtgcctcctcaatggtggtttcattataacaaaaacaatgacgcatgtccaaattaggccataaaaaaacacgccagagaatttctggcgtgttccttcatcattaaccgcagtctgtataaccgttgagttagtaaaaaaaacaccccacaaccataagttgtggggtgttttgcaaaaccgaataatatcggattgatattaacgttttgagaattctatgctcagaaatgaaggatactcaatacctattaatccttttatatcaataattacaaaatataaaaatacttatttgatgataaaaatccattggtttggataaagttaacaccaattaacaccataaaatagactagtcatttcttcattttttttgaaatacctactaaactcaatgatacaattcctaaggctgagagactatcttttgaacgttttctacagctactacatatattaatcttttttgctgaatcaattctctttttacaaaatatacagtttttttccttattcttattgttattattctttttcataatctaactccccctcacttagtaaactgaattgttttccctctttcatttcatcattgatattcagccatgaatctttattttctgaagtatatcgataattatcatgaattatttctagtagactgggaagttctatctttttaacgtcaggtattatattatttataaacggcaaacgctccaatgtattcgaaataatatttccggtttcgccaatattcctactagaatacagctcaaaaatatattttacagcctccagccgaccgtttgcgacttcctcattatcaagagttaaatcaatatatgtttgcatgccaactatttttaacaaaagattaatatcagataatataaaattagcatgtctttcgaacgtactgtatctgtacatgggtttttttagtatttttttaatgtgatccttatttgagataaggtctgatttaatggcacttactgcttgttccatgctatcagaagcagcttctaataattgaatttttcgatttaagtcatcgctctttttaaactctagtatctttgtacgagcagtaaaaaatggcgctaaaatactattgtttctatcccagtgaagctgatattcttgtgtttcctgtatatccactacaatttcatatatctgcttaagttgtgcctggacagctaaatctgttaaagtacgtgcaatatttttatctacaaccacttttttcaaagttagatcttccacacgttgatttgaattagtactatcaactattactgctctcagatttccttcaattttctttgattctccgattttaaaaatgccagactttattttttcttttgtatcattcgataaactatcaaaatctggttgataaacaaaaccatttttactgctgaatagaagctcttttaaattagtagaagttcccgctaagttaagtaggctatttccgtctaaactaaagatattatttagctctctggttcctcctttttccatgtactgtgagagtaaaaactcgtaaggactacttatctcgaaaatatcttgagtgtatttatcaacatgtgaattaaataattcaaaattttcgatattattttttatagttttagatatctcaaaagtttctttctgcccatccactatttatacacatccttttaggattctatcatttcaaactctggtaattcatcaattaattctatagttttctaggcattctttaaattactactcttatgataatatcgaaatataagtatcaagtctgtcttcaataatttcaaattgagaagatactatatcttcttttcggattaaataactaaaaggaaacatagaggcttgattgttgatttgttcaatagttaatgaatcaccaacgtaattttgtatagctacaagtaccaagagatttagttgaaactcattactaatctctaataagttctccttaaaaatataatgcttcttactacttccttccgatagtatctcccaactcttcaaaccatttaaaacagcattgactcccttataaactgactccgcacttccataggaatttctcatctcagataaaataacactagatttaaaagtatcagacatttttaaatacttcccaacaaaggtggtcgtttcactaaagaatggaaatgctaaagaagtcatcaaatattgatagataatcttatcatttttatctgatgcattatatttggctaatacttctttttgaaaagtagatggttcttttttaccacctgaccatactctagttaaattatttattatctttcggcgaccttccttacctttaaactctttggctaaaacatcatctaatatttcaaatgtatcaggtatcgaatacttaactaaaagctttgctgttaaatctaaatgatcaaatctcaatgggcgaaataaaccgactgttttcctcattctattcattccttatcttgttactttaacaaatggtacacatacttcttcaatgcttgtcccaccgtgcccgacaattttatcatttttagtgataaatgcataattttctttcgcaattaaaggataataattctgcggtaaaaactggctatcccaattctcacttactccaaaataatcttctctagttctatttcgtatacttttatcatcatatactctgactctttctccttttgaatttgctaagacaccttggttaatccttccaacaccttgggattcgatatttccatgatctgaagttatatatacttcaaaatcattctcaatcaaatcttttaaaaatgatagtaagaaacctttatccaaccaataatttaattcagaatgaaccgaccataaaccttgttgagcagcatgcataaatctatctatactatctatcacacaaccaataatttttttatttcttagtatatgttgtaaatccatttccaaataattatcacttcctagagccctttgataaaaaatatcagatttgtcaaaccctttatctatccaaaaatccttccattgtttttcttcataatttgttgtattaatagtatctctaaaattcaacggtggctttccagaaaaaatagattgtcttgatactgaagttatcgaaggaatccatgctagagttggagatacttctgttttaaattgattatttataagatagtcgtttattatattccactgagtaaaactcattccatccattacaattaatgcctttttctgattatagtcactatgattcataaaatcaggaatttgatgaaccatttttggtttaggatacaacggtagggaaactgtttgatcaaaatttttaattaaccaatgctgaaattttaaattaacatcattaatacttgaaatttgcttttcatttaaggtattatccccacttctccactgaccaataatcatagctactaatccaaaagttgtaatatcattagctacaggtaaaacatattcttcactatcctcacgtgactgttctttagataataaaattttagtttcttcataatttaaaattttattttgaaatgaatcaatgtgaactaactcaggtatcccgatactatactctttcattgctgagtaatctaaaaatgttattaaatcatttgaattaatttgtacctgaaaagatttagcgtaaacatcgtaaggtatttcagaataattatcagttcgaataaccaacgtattagttctttcatacttatatttagtttcataggcatatcgaaaaacaattggatcaagaaaatcaacatagtcaatattgttccgactaaacatatctattacactcgaatcatccaagatattatcaggatctttcacgagatatatctctcctattctaggaaacatgtttttcattttctctacccaatccatcatacaacctcctaaatatctaatctcattaatgcgtgagtgtggaacattaataatttatcatcttcttgaataattttttccggtaaatattctgctacatctacaattttttgataatctttttcgctccaagcttttttaaatcctgctcgaatagcttcagaacggaagagttttaattttttcttggttccattaacttcttctacgtaatgattaaattctcttaacaaactcttttctcttaatttttctaagtcggcttgtttatttggatcaggaacataccatctatttttagccttactcttcatcttatcatcttgatttactaaaccacgcatatcatgataattttttcgtaaataggcagcaatttgatctggaacattatcttcactatcatataacaagaagttttctgccaaaaggttatccaactctggtagttcctcatgttttgcaatatactgaatttctttcatgaattgaggatgaatatcctgtctactttgcggtttcttcattaactgttgacgcaaccattcaattgcactgctttcatctgaaacgaataatgactgttgtgaaaattctttcgctaagattctcttcttatcatactcagctacttgagactctaaaaagaccattccatctctcataacatatttttgagcaactttttcctgaaattcagctgaagatattggcacaggcattcctgactgaacgtgataggcaaccattctatcaaataaaattctaggagttctttctgaaattatatttgcttctccatgattaccatcaaatccaggtaattttaatagatgttgatctaaaaataaccacgctgaaatttcatcgccattagcttgtttcatttttaagacagtcgtttctaatggtttgtatgctgaaataacaagatcttgtttaacagcagtcgtggttgtaacagctttaaaactcccttgttgtttatctaaagctgacacattagcaattataaaccctgctttttgcatcgcatcctgaatcgcattccatatactcgccttagaattactaaattcaacagttatccaatgattttgtttcaatattttataataatttttaaagctttcttccattaaccatttataatctaataattctttattctgaatagtattgacaatggcttcatccttattgtttgtttttatacctaaccaggcttcccaaataaagttcaattctgaatagttaatatttgccccaaaaggaggatctgtaaaaatataatctattgaattttcttctaaattactataagttgcagaagaaatcccaaccattgtattcctatcagaaaccattaatgctttaattatatctttcacctttcctgaaagtactttgtatacattagtttctgcaaccaaagaaggaacatacatggttccatttaaaataccattccctctattacccaagttatatcttactaatttagaagttaatgagtaaataatagattgtaaacataaataagcatgtttttttatatcttcatccaaattattgattcgctcagacaaatcagataaaatcaataaatttcgcttagtataaaactggtggacataagaaaaaccatggcttgaaaatggttgtttcgtatttacaccttcaggtattttttctataggtatccatgattcgaaggggatttcttctatcctctgaataagtctaatatcattatcttctatatcttttaaaattttctggtttccatcaatatagtttattgctacaggtacctgtttagctagacgtactttttctcctgttaccatatctaatgagctttcatatgctctattcatcttttgctttgtcaaatttgcgttacatctatggcaaataaaattttgctctacttttttaccttttaccgcggactcataaaatattaattcagcattacattctgggcataaaaatacatcactccatataacataatttatttcatattttattttctctcccgtttgatataaccaatcatatttttctctagattcatttattattttttccatataaaatttcaatttatttacattaacaggagaattgtagcagtaacttataaaactagctactggtgataaatcacttaaaatagaatttctaatcccaacctctcctctttcgattcctaattcttccactaactctttatttccacacatagaggatgctactcctgtcatgcccgtacctgaaaaagcatcaagaacaatatcacctggatctgtgtaatgtaaaatatatttcattattgctttatatggtactttagtatgataagaatgtgcagtataaatcggatcattttttccaatgcttacatctgaaacatatggatgtcttttataatctctaggtaagctacttttttttattatagtccatggatttgggcaagctgtataatacggtggatcagataactcaataatatcttcatcctcaccaataggaaatccttcaatatcttttaagtcaggtaattttttacgcaactcatttctaaaatactctcttctctcattatcactctcaaatgtcatccctaaacattcaacaggtttattttcttcttcaaacaatgaaccttgatccataaaatcatcatcctttatacattattcttactttatctttatctttaccatcaatagctgtctctattaattcacgaattctaccttctacttcatcgacactcataggactaccgttcccaagtatttttataatatcttctttagatatctctactttttcaaacccatcaaaaaggttctttatcatatctataaatttctgatccagtggtaatggaagttctttgttagatattaacaattcaacggatttttgctcatcattggttaaaagagataatccttcttggatagaatcctgttttaaattgtctactaaaatatttagccagttatcataaatatcagttaactcatccattgcattctcaacgatatttcttgaatcacgtctatctgtacttaataaaaaattacaatgtgggcaagtcggagtcgtttctaaatctgttttctttaattgataacacgtttttgttttttctagattttcttgccaagtatttaactgctctcctggtagtaaagatatacttgattgtaggcgtcgaagcatatttaactgtggggagcgtaatatttcttgttttttattatcttcagtcgctgttagtcttgattgttcatgaattgtatagtattgcgtaatatactcttcctttaattgacgtaattcagaaagattagacatatatgattgtccatcagaaatatttgaacgtaatttagatacagtatcatcaatagttttagaccaatctgaattttgtccataactatattttgcttgatcaagataatttaccaatcggctcacttcatctacgctttttttcaatgtagttaatgcttcaataagctctttgttttgtttttgtttttcaatctcagaaatagacacattcaaatttttcattttaggaatactattgtagcgtagtagttgttcacagaataatttaaacgactctaactgatctgcatattcacttcttgtattattatctaaaacatctaaagccccaacaagatatcctattgatagttggcgtttcacttttagtacttcttcaataaaaatattcaacttagaattcattcggcggattgatccttctaatatttcttcattattatttagagctgattcaccaaataaatttaaaatttcattgatttctattaaaggcaatcctgatggctttttaatatatgagaatttagttaacttctccatagataatactgcaaattctgaaaaatccattgctgtatatgttgttccatctatattgacttcaattttccctgtacttaacaaagctcctagtaaaacaacaactaattcaggctccaaatcaaaggattttgataatcgacgatcttcaacgccacgaacagcgttaatattaaacaattcatcattgtttaatactttaccatttccttttatttctaatgtttcaactatccaacgtgcataagctgaatttgtaacagattcactagtaattgttttttgattacttagaagaactaagccttctaaaactgactcaccttgaatactgtttctaccatttattctttgtaatgcgtcagaagcaacaactttaatattattactagaaataaatcctggtttataatttctaaaacttgggtattctggatacttctcagaaaaatgttctgcaagaaattcctgtgcagaaaaattgactaaagactttacgttatcctcttgaggtaagaacattccaaaatcatttaagtatcctgttttccctttataagttattttaaatgcatccataaagtgttctgttaaccatttatttagttttttaaaataactatctattttgttcttatataaccttttttgagctgaagtagtttcattatataactcgttagctgcagcataattcaataaattcattttaaaatttttatcttctaaactaagttcaaagaatacctcatctgatttcaattcatctttatattgaactttttcaaacggtctcagcatatagacataaaaatcacgttctggttgagctgtagatctttcattaggtgatccaaagaaaaggtatcctcttctcattacccttctttgttcccaaggtaactcatgttgccaaatacgatagcctgaaacgtaagtgttatcatccagtgcaacagcattttgtaaaattttataatagtaactatctaaagtagcgttttctatgatctctgttcgttcactaattaaactttctatatcaatatctttctttaaatcaagataatattgtccattctcttggtttactgaaatatactgatagcttacagtttccatgatcatttttattgcaacagagacactcgtttctaaaaatgctgatggatcatcgtcttccaataaaaaatctaattgtcctggaattacaagaaatagatcatctttcaaagttgatgctgttaatcccacaggactgtatatatcatccactgttagtctattcaacgccaacccattaatgacttgaagtgaaacatctttatacatctgccctttacgatcactaggaaatgatgaattgactttatcttttaaaatagctgttttttctaaaacttctcgaacagatggtatggttttattagatggatcttcttcaataaaagaccaataattatcatatgcaattactcctgtactatccactggtacatcgtgatcaataattttctgaatttccatagtaatagtttttaatgctactcgtttttcaatattgtgaactttctcaaaagcagttaaataacttggatgaattggataaagatccacaaacttatccatgtcttcagctagtctactatataatttagtgaaactggttagatgctccctaacaagagctttttgcttctcatctttctttagaagtctttcagatatgacatatgaaatatcttcttttacaattcttacttgttcaaagcgttcttttacacgtctcaaagaatctgctacaaaactaaatcttgggttatcaaaaagcatttcttgaatacccgcaataaatcgaaatctcgtattatatgcaatttctccaacttctcgtaaaaatcctaaatctaaagttaactcttgctcttttcttcctcttaaataatctaataactcatcaactactagcagtaatcctttatcagggtatttttcattaaaaattgacatcatctctagtaaagaatttttattactaacaatctgatcggcattaggaaattcgaaagtaattcctagctccaataaaccaagttctaactgctgtgttattatttcacgtaatgacatttctgtactgcctatttcaaatcgaataactttaaatttcccttcaatttcctgtgctttttcagcaacagcttcattttgaaggtgctgacttgaatcactatactcagcaattgtagagataacactcattaaatgagatttaccactcccgtaattacctacaatcatcaatcctttattatctgctggtttgtaaaattgcaactgattaataatagtattattaattgtatcagccattctgtcggatataacaaaggtatctaataagtgaagagctctttctttattgtttgcatctgttagttggatgactgaatctattggttcaaaattaactaaatctctatatttcattcttcattctcctaattgataatcatttcatttttatttatctgtgtttcctgatattcagcatgttctggaacagcataaattaatctattgttttcataagagtaacgccaaataacaataattgttttataacgactcagttctctaaataattctattggtttaacttttaatattggactaaataatatctcaaaattatcaataacaataaccttttgaggattatttctaataacttcagtgataatttgctgtgtttttatagcttgtaatttagaaggtatatctaataatcgctctgatatgattacattgatattaagtatagaagaatctatttcttcaaaaaggtttttaatctcggtattattattccataacaaaaccatgaatcgattatactctaaattcttttcttctattttttcttcaagcatctttataaaccattcaatatctttcatccatcatccacccatccattagaattactttttaaaccacatgtgcctattataacatctatgcttaactaagatagcactagagtagccatgaaataaaatgatgagatgttcaacatgaccaaatcagtcgttaactttttagctgtcattataatcgttcatttaaatcattttatctacaatgtgctattaaaaatagattaacgagcatatggagcactattgaacatctaatatccttcgtccaaaaataggtactgcccaatatccatccaaatgaacaataaataagccaattatagtcaattttcagctgatgcgcacacccaaaagcaagccctgatacaataattttcatcaccgtatcgcattcgtttttttaataaaaaagagattaaagaaaataccagaaataataattcttctagtgttggtgcaaacaaatcattgctgagtgtcgtcaaaatcggaacagccttcattagctcattaatatagacttgattctccggcagcgctaatgggttccaacgtttatcgatccaatcaatcactagcacaataccaaacatcactaaaataagtacaactttctttagcatcggctctctttacacattttgccagtcaggttttggttgtctcatataaattctagtaaacaaaaagactattattagccacaccccaaaattaacagcaatcaatgctggttcatgcgtcgtcatataatttgtactcaacccgaaaagggcttccatatggacgaacatcactaatatcaataaaactataaaaaagctaatccgatggcataacgttccgatcttcaacaatttctttctggatcccctactaaactaataaccatatctaatcatcgataatgccgtcatttcttttaacttagcttgttgactggctgatagatccaaaccttctttttgaatcacattcgcaattgcgatgttcattcggctcaaaattaatggtactgctgtcgtttgtgcttcaatttcagtttgataactatgcaaaactgattgtaatggtgccgtttggtcatcttgtttcaagtcgtttaataatgccttaatcattgtaattgcttgatgcccacgttcctgtccatctgcataccatttcatattcaatcgtcccttactcttaatcaactgttgagacaatcataacgcttatctacatcattgacaaataactaaaaaggaactataactagtgtgaattattgttatttggaggggtttaaatgataagtcaatcaattgcaaaagaaaacatccatacactttacaacagtctaatggcgcatccggataaatcaaatgcattgttagatattaccgatgttttactacaggtctacctcaaaattgatacggttaagaatcccgaggcactcgtcaatcgcctggccaattacatctatagtgttggctttggcaagattcatctcaccaaggatgaagaacacctattgattgatttaggcgcgtttggccaacgtgctggttggaacggcgtttatcgcggtgattatactgccaaagccgattttttcagctatgccgatgaacataaatatgctagaaattaaaagagtgtgacggaagtctgggatttcccgagcacgcttagacgattagatttgaccatcagaaaagggattgagacaaacacaacgtttgtctcaatcccttttttaggcaagaatattgccaatcccatggttaataatcgtaaattcagtcggttgtaaatcagtttgttcagtgacgattggattcaactggtcaatcgtaaacggcgaagtaaacggaaagccgtcaccgtactgattaaaataagtcacagtattccccagcacgcttttcaattgctcagaatcgattgcccgcgtcactgtcaccaaatacgcacgattgttatcgcccgtcaaagtggtgctcgtaaaaaatttaaaatagtctttcgtactcatcactgatccccccaatctttaatcaacgttattataacgctttcaaagaagcaattacagtatctttcgtcaattccattataatccaccatcattgcaattcatcaccgttacgccagttaacttagatccccataccacatcacttggtgattatcatcagctcaatccgaagaattacgtcccagccttacaaactgaatcgggcgagttcatgactgaatgcgccgttattttggaatacatcagtcaacaaagtccgctgccattaatggcggactatgccactgaacagtactggcaacaacgcacttggctgaattacatcgccactgaattgcataaaaacttcatctcaccatttcgtaaaggcaattggctccccaatacacccgaaagccaagatttagtccgttcgcgagttttcccacggcttgcttatgttgaaaaagcgttagcggaccagtccttcttagttgctaatcagttcagtgcaccagatgcctatctatttgtcatgacgaattggtgtcaacgactcgcattttcattggctgacttccctaatctggatcgttttgatcaacacatgcgacaagacccagccgtgcaatccgtcctcaaacaagaaggcaaaccacattcattgaaagcttaatcaccaaaaaaggaatcagcagtcgctgattcctttttgaatgatttacatcacattaatcgtgacatcaatattgccacgagttgcctttgagtatgggcaaatttcgtctgcttttttgagatacttcattgtttcttcttctgataaaccttcgatgtgaccgaaaagatcaacaccaatataataattggcagggccatcactataaagggaaacagtcgccttaatcgtgggttcgcctttaatatgttcttggttaaggacaacatctaaggcactgttaaagcaagaactatagccggctgcaaagagttgctctggatttgtactcttccctgatgggtctgtccctggtgacttgattacatatttctttgcttgatcgggtgaataaacgaagccattgcggcccccttcattaatcatcgttgtttcatattgttttgccatttaaggtccctctttcttttattgaatacccttactttagcacagcaaaattcagaaccataatgatttgtttatacaaaaaaggcgccagccaaaaaatagattttggactggcgcctttcttgttaatcctcaggctataaccggctgatattcacacgctatttaatataagccgtcttgtagctccattgtgcgccagctgtgttatgcacaacgtctttgacctttggattcttcaagtatgccgtatcattttgatagagtggtgtaatcccttggactttattcatgacttgcgcagccgtcacgaggtccgcccaacgtttgtcaggatcgttcgcatcggcattcattgcgcggtcaagggcagctttgtattctggattgtcgaagccgccggtattacttgcagcccctggtaacatgatttctaaaaacgaaattgggtctttgaaatctgccccccaacctgcgagtaataaatcatagtcgccttttttatcacgactcgctgaaacttggcttggcacggtctttaatgtcaacttgaagcctggtaagactttttcaagttgacctttgagatattgaccaacatatgacgcgttggcatcatcggaattaagcgttaaggtgagggcaactttcttttgaccagtcgctttcaatgcttcatgccaatgtttaagcgctaatttttgattgtaatccacggtatctggcacggcttgtgatttagcaaagtccaccttcttaggggagtcggctaagcccactggcacgaaaccagtaatatcgtttttcttcgaaccgaatagccggttattcaacgtcttacgattaatcgctaacgaaatcgccaatctaaagtcttggttattcaaaagtgcttttttctgttcatctgctgatttgaagttatatttaatgtagttcgtcaacgcataaggatatctatggaatgctttatcatcccgataattatcaatttgttgattatccaactgggttaaatccagtttcttttcctgataaagataaagcgcggtgctggtattttctaacacggtatagttgacttggtctaattttacctttttgcgatcccaatattgattgttcttcacaaattgccacttctcactcgtcccattccagttaactaacttaaacggaccagagtacaccatgtatttcgcattcgtcgcatacttcttaccatatttttcaaccactttttgatcctgtggggcaaataatggataagccatcaaggttttcatgtaggccacaggtgtggataatgtgacttccaacgtgtgctcatccactgcccgtatgccgagttggtctggtgccagctcaccttttgcaatcgctggggcattttggatattactgaaaaggtttgtataaggtgatttggtttctggtttcaatgtccgttgccatgaatagacaaaatcttgtgcccgaatcgggtcaccattactgaacttggcatcacgcagtttaaatgtccacgtcttaccatcagctgaaactgaactcgatttcgctaagcctggttcaattttaccgttctcaccaagccggaataaactttcataaatgttccctgtttgaccatatcccgttgaagtcgagatatcaatggtatctagtggtgcttgcgcgccaagctgaagaacctgtttggcttgcacccccgaaacttggcataataagaacaccccgaatataaaaattgcactaacactaagttttaagaactgccgccctctttgcatgacacgcctccttacatttaataagtagagcataccaaatcatcagtcaaaagttaaataataagcctaaaaaaagaggcctttgtaaaattaacttttacaaaggcctacaatattaattagacggaattctcgactgacggcacattctaaacgtgcttttcaaaccatgttcctgcgtttagcctaattagccaaataagcggcttcgccgctttttcgtctaattttgctaatcctcagaacataaacggtttgaacgcactcttattcgaaacgtgctttcaaaagcatactgctgtgcttagctacacaagtcaaatgattgctttcagcaatcattcgtcttgttaggctaatgctcgcagtatacccgcttttgacgcactctttagttcattatttcaaacaattgttttctgaattctggaccatacatgactgctccgactgggatggcgaagtctagtgcttcgttaattttagtcgtccaggttggtccgaagcccccacagagttcaataaattgaatgccttctgccttcaattgcttagcgacttcaataattgaaccatcttctttagcacgtggatcgaacccgacggtaatcatctcgcacgttcccattggattacggttaatcaccgtattttattcaggtgaaaagtctggtgaaaaatagaaaaacgcccatttatgcaaatttgctaatgccattgtttcgtcctccttgtttgctttcatcatagagaacaatcatgatagaggcaattttactgcctcttacagccagccattatgccgtgcaatctgaattgcttcaacgcggttgcttgcatccaatttgcttaaaatcgtagttggtgcgcaatctcaagccctgtcatgcccggcatctcaatatctaacaaaacaacatctggttggagggtttcaatctgatcaagtgcgacttgtccattgacggcggttccggccatcgtcaaatcatcctctaaatccagaatgcccgctaaagcggtattcaatagttgctggtcttctgccaaataaagtttaatcatgcccttccctccatcttaagtggcaccgtcatcgtcaactgtgtgccccggcgaccatcgaccatcaactctccatcaatcgtttctaaccgttcgcgcatgcccacaatcccatgactcttatattgatcttcgcttttcaatccgtgaccattatcttcaatctgcatctgaaaagtcgttgcggttcgattaaaaaccacgtaacactccgttgcctgactgtagcgaattatattggtcacggcttcatgtaaacattgcgcaagcacttgttgattttgttgtggaatcccctcaagttggtcttcatttttagtcagcagtaaaatgcctgcaacgctgagattccgttcttgattgatcaattcctcagcaacggtcacttggcgtaaaccagcgacaatctcacgcaccatttttaaattctgacgggaggcttgttcaatctcgagtagttgttcgggtaccgcgtccggttttttcgccaataatttacgtgcatattccgcttttagcgtaatcattgaaaatgactgacctaaattatcgtgtaaatcccgtgcaattcgttgccgttcgttctgcttaatcatatcggttaatcgctgattggtctgcgttaattggcgatttttccgattgaaacgctgaatcgagctagccgcaaatggtgaaaagatgcagaacaagccgtacaccattaagccaatcagatcatcgcgtcccatatgaccaccataataccaatatagggtgaccgctggtatgattagtgacaacagataagcgtagtaatagcgccagaaacttcggcggcgcatgggaatcgaaccaaacacccaggcagtataaatattcagataaagcgcctggataatgactgctaaaatcgcactggtcaccatttgtaagataatccagaatgcgcgataccgcgatgcgacatacccattgcgataagccaccaagaaaatcagaatcaagcccataatcgcttgctgcttaaccgtttgatacggaaacgcataaccaattggaaagagcaagaaaatcaaccaaacatatggaaataagccatattggggtggcatggcaatgtagcgtttaaaaaaattcatgcatgcatcgctcctcttttatgatggtttaagtatacgacaattgccagtaataacccagcccagagcaacgtgatgccatattcacccaagtgtgcgggttgatgcgcaatcagcgcttggccaatatgattaatcggataaaccggcaaatgcttgccaatcacgcgagctgttttgggcattatttctgttggccaccataatcccccttaaattgctaaggggaaagctaacaaactagacaccagttgaatctgattttcatctgttaaaaatgaaatgctaatcccaattaaacaaaggggaatgctggcaaaccacaaccagcccgccgttaataaccaactggaccacactaaatgaatttgattactaatcccagcaactatgaaaatgacgccgatcgttaaagcattgattaagcctaagttcaacaacttagccccataataagtccgatgactggttggtgataaatcgattaaggaaaccaagccatcccgtgcgtcattataaagtaatgtcgataaagtaaacgtgttgctgagaactaaactataggtcgccatactgaccatgtattgtcgattgaatgctgcattcatcacaccctgtttcattactttcgtaaacaagagataaaacgcaatcggcattaagagtgaaaaaataacaaagcgtggattacgccaatatgcgcgtttaaagtctatttttgtttgtaccatcattgtttgtattttttagtcctccatcatttcgctataaatttcatttaatgagcttgcttgaacctgcacatcatgaacctggatccccatcattggtgctaattgacttaagatcggatcgctcttggtaacttgcaacagcaccttggccccagtcttcgtcacgcggatcacgcctggccattttgcaaaagtagctgctggtaaatcagtcgtaaagcgaatctgcgttcctttaaattgttgttgtaatgttgccaagtcaccatcgaattggaactggccatctttcaataataaaatccgggttgcaatgtgttcaatttcctctaaataatgcgacgtgacaataatcgtcttgccggcttcttttaactgttcaatttgctgccagaatttttgtcggctgccaacatccattccaacggtcggttcatccaagaatagcaaatccggattgcctgccatggctaaagcaaaggagaggcggcgtaattgaccacctgaaagttgggacaccatcttatgagcctgtgccttcaaatcagctagcgttaataattcagtgactgaccgtggctgttgataataactgcaaaccaattctaattcttcgatgacactgacccgagccaatcggacatttccttgcatcatcgcacccaataagttgaaatgttctttctccgttggcttctgacctaaaatccgaatctcgccagccgttggttggagtcggcctaaaattaaattaatcaatgttgacttgccggcgccgtttgcacccactaagccaacaatctcaccaggttgaacacttaagtctacctgatttaaaacaacttgttgttcgaattgcattgtcacttgtttaatttcaatcattgtcatcacctcatttaataaccctagtatagaagtgattccgttttgtcgttagacgattttgtcatgacttacagatgacaaatgtcatgtctttggtgttaaaataaagctgattcgttttaactcggaggttttaattatgacaccaagccaaccagcagcaccatcattttttacgaaccggtctacccaagccatcgcgcaagatttattaggaactcacttgctttataccagccaccaaggcacacttggcggcctcattgtggaagcagaagcctatgtcggcaccgatgacactgccgcgcatgcttacaatgggcgccgcacatcctttagcgagccgctctatcatgagcctggtacaatttatatctatcaattacgcggtttctttctatttgatatcgtgacccaagcagtggatcaaccacaaggcgtcttgattcgcgccatcgaaccgacccacggcattgaacaaatgcgcctcaatcgcccgaaacctggcgtcgaactgactaacggccccggtaaattaatgggcgccctcggcattcacgataaacaactgacttttcaaaatgtggcggacgcccctttaatgattgatttatcgcatcgtcgccaccccaaatcaattgtcaccgcgccacgaatcggggtcaattataaagcagcgagtggtcaacttccttatcgctattatgtcgctggtaacccgtatgtgagtggtctgcctaagcgccagtgggacttagaacaacatggttggcaattttagcgccaatgtcaatttttaattgaaagcgatttcaacaatgctataataatcttgtgaattggtagattgcaaatttaatccgaatttttggacaaatttgtcagcataacctgatatccataataaaaagctcctttatgatgtattatatcgaacagtttgtccgtaattccatcataggagccatctgattgttccatgtttaggtaaactagtcccttttttagtctgtgttttggatggtgtatgtgtttcaatggaacgattgcaaccagtcataaaaaacattgtgatagatagtaataaaatgaagactggcattatttttttcatagtgattgttttctccctgatcattgaatttgataaattggatagcgattgtagagcgggtcgtttagattggctgtggcaacaatggcttgtagtgtgaagtcgcgtggaatgcccactgtgaccatcccatagccaaagtcttggtgtggtttaaactgattatcggcaataaaaatgaagccgtcttcgtccagtttttgataggaatcgtgcgctagtgtttgcgtagttgtttgactcaaaaacgttttgagcttatttttcgtattcagttgttcgttcggttgatgcgcaatgacgaaaaaggttttatgccggtaagacagccaataggcttggacatcttttttgtcgtaagtctgttggttttgtggacgcaccgtttttttctgcgaactatgctgaggcgtcgttgtttttgcaggatggttctgacaggctgttagtcccaataatgcaacggtcagcgtcaatgttagccagagatgcctgattttcataagatcagtccttcacagtttagtttaccccctataattataacagttacgcctactttgactagtcttaaatattaagttttatcgaaaaacgataaaaattaattgtttttcaataaaaaacgattataataaaactattcttaaaaacgaggtatcagatgaatgttaaaaaaatggctacttagaatggcattactcggaattgcggcggtatttggtctgttaagtttgttagtgacgatccaaattgtgaccacgaaacacttagaatacccagcgacaatctggatgttggcgattgctgcgtatggtgtgacggctagtatttggtttgcattaatcaagttggcgcagattctccgcttaattgagcaccatcaagtttttctccctcagacgctacgatatgtatcagcaattagaaaagcgattttggttgcgagtttgacggccctttttgccctaccctttttctaccggattacgcaactcgaagatgcaccaggcttgatgttgctggggttaggcctggtcttcattccgtttgcaatcctcattttgatgcagattgttgaagatctttttaaaagcgcaatcgcctttcaatctgaagtcgatttaacggtctaaggaggaattcaatggccattcgtgtgaatttagacgtaattctcgctcaacggaaaatgagtgtcacggcgcttgctgaacaggtcgatattacgattgcgaacctttcgaatttaaaaaccggtaaagccaaagcaattcgcttttcgacgctcgagaagttatgtcgcgtattagactgccaacctggtgatattttagaatatagcgatgattaatcctgcggcccccttttatcggggaccgcttttttaatgcttcagtacactggttgatgcgatatgtagtataataaatccgtagtgattatgaaaggggttttatgctgatgtattacgttgtgatgaagtcaaatgatattcgccgaaacttggcaaccgaacaatatttaatgaatcaaaaaaatttcgatgaaccactcttactattctacattgagaaaccatgcattatcgtgggccgcaaccaaaatacgtatgaagaaatcaatcaaaaatacgtggaagaccatgatattacggtcacacgccggttgtctggtggcggtgggatttatcaagatctcggtaacctttgtttcagtttcgtggtgaacgcagattctgaacaattcggtgatttcaaatccttcacgcaaccaatcgtcgatgcactccatcaaatgggcgccacaacggctgaagtttctggtcgcaatgatatgttagtggacggtaaaaaattctcagggaacgcgatgtacaccaagaatggtaaaaccttctcccacggtaccctttcatgggatgttgatttagatgttttgacccaagccttgaatgtccctgcagataagattgcgtcaaaaggcattaaatcgattcgacaacgcgtcacaaacctaaaagggcacgttgatcctgaataccaaaacatgtcgacagaagagttcagagacgtcttattactgaacttgatgcacgccgatcaactagctgatattgccgaccgcgaatatcaattaacggccgcagacgaacaagccatcgataagatttttaacgatctctatagcaattgggactgggtctatggcaagtcacctaaatcaacgattcaaaaacgcaaacacttcgatttcgggacgattgatgcgcgcttgttaatcgaaaatgggaagattgccaacgtcaagttctacggcgacttcttcggttccggcgatgccaacgaattggctaaaaagttagtcggcacggtttatgaccgtgaacatttagcaagcactctcgaaccaatcgacaccacgtcctacttcacagggattccaaaaacagaattagttgaattattagcacaatagtaactagctaaaaagagctactaccaaaataatcttggtagtagctcttttaggttaacgtgcaaatcgtttaaaacgaatcgtcatgcgtctggtttgcatgaagtgttgacaaataccagcaataactaatgggatgaggatgcctattaccccactaatccagaaaatcggttggtggaatagatttgcgagttggttcattggttgatcaccaggaatgttcaggacaaaagtatccacccagcttggtaacatgcgttcaatcgctggttcaatgtagtgttgatagagtgtcgacagaattagccatgcagcaaataagaaaagccaagctttacgttcaaataacgtaatgaaactgctaatggcaatcccttctgccatgatggtccagatgagtacaatggccagcaggacgaaacggctatcaagaaagaagcgattaatcccactttggtgggcagcaatgaagtatgtgccgccgtagagtgttaggaaactaatcaattgactgctgaagaggctaatcacttgggtggtataactaatactgcgcggaatgccatttagaatcccaaaattaaacggcttgcgggttgtcgcaaacgaaaggaaaatcagaacgagttggctgacgactaaggaaccgctcaagagcgtgaaccaaaaggccttccaggtcatttgattggagaagattaaaatggaaccgcctgtgatgatgacgaagacggcaattgccattaataagccgcgccaaatcgctgctaggcggtaccgcatcattgcattaaacatgtgcttcacttcctttgttcgttaatttaatgaaagtttcttgtagatcgatatggtcaatcgttagacgatctggaataacccgttcttctggtaagacgtcataaagataaaccgtgtataaggtccccatttgctgggaatctaagacgtttaagtcggtacagtactcgcgaacaagttcttccgggccactgacacggtaactcttggcgaggacggtttccaaatcatcatcgacaattaattgagcgtcgttcaagaccaagacgtgttcgactaaggtcgcgatttcttcgatgatatgggtcgcaacgacaaatgtccgtggccgactttcataggcctgtaaaatgtagcggtataagaggctgcggtagttagcatctaagcctaagactggttcatcgaggaaaacatattccgccggcacacaaagcgcaacaattgttttaaaaatcgtgcggtacccagttgaaagctgattgagtttcttttttggattcaaatcaaatgcagtcagcatttctttggcgagtgcatgatcaaatgaaccttgcagtaaggcggtatttttaataatggtccgcaatttgtcatctttattaaagagattgatttccgacatcaagtaaatcgtttgtaacggatgatcgcgaccggttaagaccgtatcgccccatttaatctcacctagggatgcagtttgatgattggctagaatacttaataaggtactcttacccaccccattgcggccgagtaagccgtaaattgtattgggtttaagtgttaagttgatgtcgtcgaggacgacctgtttcccaaattgtttaatcagttgtgtggtttgtaaattaggcatggtcataacccctttcaatcagtgcaattaggtcgtctttggttagatttaattgttgtgcttcagtgataaattgggcaacatagtgttcaaaaaattcagattgccgtttttcagtgatctgtgcgggtgcgcttgatgtgacgaacatgccgagtccccttttcttttcgattaagccgctggtaacgagttgattcatccctttgagtacagtggctggattgatattgaattgtctggaaatttcagttgtcgatgggacttgactaccaggtggaaagaccccagtaaaaataccctcttcaatttgttcggcaatctgccggtagagtggtgtatcattattaaattcaaaaagcatccggaacacctccgtttcgttaattggttagttacttatgtagttaactataatgcgtaggctgcgaaatgtaaaccgctcctcaaaaacatttgattattcgttcatattcacctattatgtacttataatcaaatgttttcagagaggatgagaacgatgcagacagcctattgtttcattgatttagcggatagccgcacccgttttacggaacaagcacagacactccagttattgcaacacttcgccgacacgttgaatcaccattttccagcgttattaacaccatttgcaattaaggatggtgatggtctattgggcggtttttcagcggatgaccaggcacagattgttgatgtctatcccttttgtaatgcctatttaaagagtgacgcttttcaaactttctggcagacacattttgcggggctggcggagcccactttttattttggggttggcttaggaacgatgactacgccgagtccaagtgactatcaggatatcaatcgggtcaacgggacagcaattgtgaacgccctcgccgcagcagatcaagccaaactgttgcgtcaaggtgctgaattagcacaaggttatccctttatgacgacggcctttcaatttcaattagtggcagatcaaccagccgcaaatgggattaatgccctcttttatttaatttatgagcaactcttgaatacgcagttgcgcaaggacgcttttgctgaaatcgtgcttcaaccaacattgaaacgctatgaattagcggaattgttgtggaccaaatacggcgttgcttcctatgaactagactacagtgatcaaaaagggcgtgcattagcctctagtaaagtcagtcgcttactgaatcagattcagtatcccttgattgaacagaccctggcaacgttgcgcgcgcaactgatgacctttaaggaggcagtcgaatgaacctctttgcgcttttcttgcttagtcatattggctgcgactttgtctttcaatctgatcagatggctcaatgcaaacgatcaacgaaactcggtgtgaaatggtggccattatgcaagcacgcactgacacaagtcccgttagtgcttattttatggggtggcggttggttaatggcaccacctacttggccacattggcaaccgttactaatcggcttagtcatcattgtgatgagtcattggctcattgatctatttaaacaaaatagccagccacttttaaaagcacagctacatttaaccagcaatcgcgtaccagtgatgagttataccatcgatcaagcactccatttaatagtgatcggtcttgtgagcatgttcctcggccagcaatgggcgtttaaccatgtgaaccgattgttattggctgccagtattgttttgagcacgttattatttgccgattatttcattagcttctatttaaaaggactggatttaaacatggatcgcctgccagatggtgcaaaactgggtcggcatattggtcatttagaacggtttgccatcttaatcttgttttacacgcacaatgttgcgagtattgctgtgattgtggcgattaaggcgctgacccgctttaaagccattgaatccaacgaacaccacttcgccgaatattacctcattgggagtttgctcagtctgatcttcggctgtcttggcggttatctattaagtcttattgcgcattaaaaaagtgccacagaatcaggatttttcctgttctgcggcactttttatattattcagcgatgattaataatgatttaatcgctttgcgttgatccattgcttcataagcggcttgaatatcatctaaggtaaagcgttgtgtaaagactttaccaggattaatggcaccctttaaaacagcatccaataaacgagcgcgatcatgagtcgttacggcagcaattcccccacgcaaaccgatgttcttccggaataaggcattggtgttcatctctgctttttggggaatgccgacacgaccaatgacagcccctgcgccagcaacggcgacggcagtggcgacggattgttcggtcccgacacattctaagacggcgttggccccagcgttgtcggttaacgccatcacttttgcgaccccttcgtcaccgcgttcagcaacaatgtctgttgcgccgaattcaagggctaatttttgccggtccgcatgacgactcatcgcgataatccgtttcgcaccgagtaatttggcgccaatcacaccacataaaccaacggcgccatcacccatgacaacgactgtgtcaccgggtttcacttcagcggacacggcagcgtgatagccggttgccatgacgtctgaaagcgtcaatagattattcagcatttcatcagagtaatcgcttggttggccaggaactttaacgaggccccagtttgcattgtgataacggagatattcggcttggtagccaccaggattattctcgcggttggtacaatcgccatcaaaaccgtttaaacaagcggcacagtggccacaaccatgggtaaatggcacgatcacaaaatcaccgacactaacattttgtacgtcagtcccaacagcatcaacgatgccaattgcttcgtgaccggtgaaaccgcctacttctcgttttgaaatcccacgataccaccataaatcagaaccacagacgcacgcgcggataatgcgcacgaccgcatcggttggtttttcaatcgttggttttggtgcttcggtaatggtcatttgaccaggacccataaaagtagctgttttcataactataatctcctatctcttcctattatattgtctttactatacaccttagacctcactttaatgcaagctttttttaaagtccaatcgccagttgttgtttcttgcttaacacttcgtcttgggtaatcccaatataatggagcgtcgtttcttgcgttgaatgaccaaaatcaatcatcaatgaccgcacgtccccgaattgtttgtagaaccagtagccgtaagttttgcgcatcgtatgggtgccaatatcattacgcccaagtttcttacctgcttcagtcaacatgcggtaaacaccgttgacggtgatgtggttatcgccgacgcggctaggaaacaaccaatcattgcctagcaattcattattttgaatatagggactgatgtatgggcgtaaactcgccaaactaatttggcgccacttacccgttttttgttcaacaatcacgggattgtcttcgatcacatctttgacttttaactgcacaatatcagaacagcgtaagccagtattaatgccgagtaaaaataataaataattgcgactacccatttgtgaatggcgcaagatgactttcatgtcttcaatctcatcttttgtccgtaaaggttgaacatttaattttttgccatttttagtgcgcgatttccgcatgttttttccgcctttttgaccgcattctttttctctatatcattataaaccatgcggtggtattttgcacctttgattatcgttgatttaaagggattccgagcgcattctttctaccaaaagaatgcgctcaaacacattaaaggctattgatggctaaatcacggtctaatcacgtttataaacgatcaatcaccagaggcgcattttaaggacgtttcagattagtgagtggacaagtggtcgcgaaacttgcttaaaatgcgaattcaaaaaggccccttaaagtcacaaaaaaaacagcgttaagacaaaaagtcctaatgaagtgaacccccgatattggaccaaaatccaatatcgggggtttttatattgaccggagctaaaactatgcaacaagttgtcttacccatcaaagattcaaacgttctcaaagaggttcaagataccttactcaacaactttaaagctggccggcgtaactatacagtttttcaagttggtaaagcgacgctactgcgagtgagtgacgttatgggcttaaaacaggccgatatttttaatccggacggttctattaaacaaaatgcgtttattcatgaccgaaaaactggtaaacctaataccttgtaccttaaacctgttcaaccagagctcttattgtaccgtcaatggctgcttgatcatcagctggattctgaatggctctttccgtccattcaacaccccgaacgccatatcacggaaaaacagttctacaaaattatgagtaaggttggcgagctgttaggcattaattatctagggacccatacaatgcgcaaaaccggggcttatcgtgtctacacacaatcaaactataatattggcttagtcatgaatctgctcaatcattccagtgaggcgatgacgttagcttatttaggcttagaccagcctagtaccgaaacgatgttggatcagattgattttggttaggaggttgtccttatggatttagattttaaaaccaacaaatatgagctgtttgatgattggcaccaaaacaagactaaacaagaatttacacaaaagtttcagcaacaagctcaagttgaaaaaacacagctaccacaattattgtcgcgtgaagacttaaaaattcgttggcagatgaactctcggcaaagtgttcatcaagttgctagtaaacctgatttcccacaacctgtttttgcttttaatcaacggctgatcgaaaaaggcgccctattagaaaaattgcttgatgaccacggcgatgcagctcaaaccgaaaaggagttacaacaactgttaagcgctgaaaatcgctatcaagaactaaaacaatttactagcaagattaaatatcaagaccaatcaactatgtttcagcattttgtacaggaaatcaaaagtcgctagtccttataccggatctggtgcaaactggattgaagtcaatatttgagacagattttaagagacattcagaaccgcgtttaccttccacagctcaaataaatcattggatgtggttgtagacaataactgttttgttttcaccaaccctaacttgaaaagctttagtaggagccaaagcctgcggattaaaggatttatccattttgatctgaacaacatcaggtttatttgtcataaaaacacctcatcattctttattgatgaggtaattttaccgctgaaatatactcttttatagacggtcggttattaggtgcttacgttcaaaatgtcaaaatcggttagtcaatttgtgccaaacaagtttgaaaaaattttcaagcgttggttttttctcatttttaaacccagtttgatacattttgtgataagaaacattgcctccagttgtagcttcctgtgaaggtgtagttgatggcagcggcttcaggtaggcatcgatgcgttttactgtatttccttgattatcgattgccggcactaaaatgactaagggctgcggttgggtcgtcgaagcagctaccgttttcccgacgacataaaaagcttttaactttgcattggccggcaaatcaatcgttgcgatctgttcagtcgtacttgccggtgtactggtgacctgtccgaaaagttcaagctgatcagcatttaaccgctcgacccgctttaacaggaccgttgctaaaaattctctttgatcactgcttgaaagtgagacatccttgaaagctgaatcttgcgccagtattttttgcaggtataaagtggcatcatagattttaaaagtcgtcttggcagccagttcatctttttggtgcaaaactagcaattgggtcaaaggatcagctaccacaggagttgccaagctccaggtacctaaaatcagcaagccaaaaccgaatatcaataaacaaatttgccgccatattacccgtgctttcattgacccactcctttcatctaatttctaatctgatgccttttctttatttttcgtttactccaccagtgcagtaataatactaaggctaagatagctaccgtgataatcaaagcccacgcaaaaggtgaaagactattacggacaattttttcttcatgatatgggatacgatgaccccgcaccagtaatcggtgagtgttgataaacagtgggacacaagttaccaatgtagcatagtttttccctgctgtcgcctgcaaatatggcagcattttactcggtaaaaccgttcgcattttatcaactcggtacgctctgattttaccatgaatcttcaaataaaatttatcaccaacttttagccgtggtaaattagtaaacaatttagcaattgacaaaccactgtgacctaaaattactaaattcttaccttttccattaccagccaaatcactggcaccattcagtaatccggcaccattgtctaacgccgtttcactgactgtatcaaaaactgggagttgtaatttaatctttggaattgctaaaactgcaactgtatttagctgactcaaagcaacattaactgttgatttacttttcctttgctgcgtaaacggatcagcatcggtaatcttagtttgatgattctgcaggtgatacaaatgtagcaaatattttttggctgacattttccctgtttgctgatcataattatcaattgccgcttgctgccgctgacttaaaagttgatcagaaataaatggatatgttgctactccaatcaataaaactactaaaaggcaatagaaaagattaccagtaagtccacgttttttcctgtcagtttttttagccataattatgcgttaacttttcttgctttgcgatattctttaactcccaaggtcgtgccaataacgatgactaaagcaatgattaacatcaaccattgactaccggttgacaacaatcctttggcattatcatcaacctcgatcgtcttgctattactactttcatcaacagtaaatgataaatcacttgttcgtaactgataaccagtgggagctttaatttctttcaaagaatacgctccctttgctaaaccttcaactgagaaggtgccatcagttccagaagtaaagacagttgcatcatcttgggagcttacccaaccatcacttatctggttcaaatactcaccgttactattcctaacgacaaattcagcaccacttaaagccgaattaacagtgccagtacccaaaatacctgctgatttcttgataaattgagcaccataagtgtaaacggttgctttaccggtattagtattttttcctgttccattattccagttcaaattataattattatcaatatctgtagcaactttagctgttgttggatcaagtgccatactataactaatcgtaaccactttgccagccagagaagaatttaacagctgattgctgctgtctaaaaagtcaatcttataagtcttattatcagtatcataggttaaattgtaatcagtgctattagtcaatgctgtttgtgtaccatcaacactatcaccgtaagttaaagtaaaagcagtatctgaagaatacttcaaaccagttcctggtgtatcgacccagttaaatttggtgtaatcactaatattatttgggacggtgatcgttgcttgatattttacagtagcaccttgatcaaatgaattatccgttgaggatccattagtgaccgttttagttgaagctggtttttgatagttgatataagtttggtcagttggtgtgacattgccatcgctatcaattgtaaatgttaacttattgtttgcatcatttaacgcatctttacctaacaaatagccatcacctgctgaaccatcagttgaaacatcatcactagcttcctcaacaaagtagtatgaaccaaccgttaagttagttgctgtgattttaccattatcatccgttgtcagttcaacctcactaccatcagaattggttacctgagtgcctgagcctggagtacccttataaagcaagaacttagctcctgctaaagctgcagccgattgtccattcttttcagcttgtttagtcaaaataaagcttaacgtttgaatctcatttttaggataaacgttgactgtactcaaatatccatcgccagtgctattagtcattggtgtaacaaccaccattggctgtgcagttgttttaatcaatttgctggactttgtttcagcaattaaataaacatgatgattttgtgaggatgaataatttggcaagtcactaaaagttaccgttccatcagtacctacatccttttgatttgccactttattagcatcagtttcatatgttgaagcattctcaacaatttccgaaatatcaccattagtcagaccatctgttgagtatttacttgaaacaccgctggtaatgtcataaaccgtaaaacctacatcaccatatttagatggatcataagcagagacagtacttggtaaagacaattcactaccatcattgtctatgcttggtgctgtaccagtatactgcaatttatgaactgtaatgtctaccgttgaagatggagtagtattatctgcatgtacttttgaagaattattttgcaaacttaagcctaataaagctcccaagaaagctaagaccgcaacaccaataaccaggagtttgctggtctttgtttttaaagaactagaattcattgattaatctctccttttttaattttccctttactaattaatttaccttgaactacccgtcgtttatggccaacctgtgcacaatcataaacggttacaattggtgtttgttttcccgtaggtagccaataagctgaacctttggctggaatgccatcaactagcttgacatacggtgaaacgactcgattgctgtaaacctgataagaaaaacgataatgtttgttatataaatagacacgatcacctactttaacgcttttcaaatcacttaatagcacacccggcaaccgcatattatgaccagcaaggacataattgccttttcccatttgtgagtcatagtaataatctttagcaactcccaaggacaatgtataacgattgatccctgaaaaaatcggtaaatcaactttaatactcggaatttttaggataccgcttgcatagcgattataccctttgtcctgagcttttcttcgattgcgattcaagcttgaaatagtttgtgaattgatgcgcccattacctaaaaatcggctgttcagctctacttgaggagcctggcgcaattggtaatataaataatagcgataaccacgccaacctagataggttaacatcataatacaaaacaaaattccaaccgagtagactagttgtttgatatgcttttcttgtttcataaaattatcctattctttggctcgccggtgcttagaaattactacgatggcaattcccaaaacaataatcaaaatgacgattgccagcaaccgttgactaccagtttgtgggatatacttgattacacgaactgttactttattcgtaccattgctatatttatcaattccaactgtagcggtattgtcgatatctgtctcagttggggcattggcatttatttgacaatccaactcaagaatatactttcgctgatcataaaccatatgcgaattcgtcgaactatcaaaatcagatggattggatagaaaatcagcagtaaacgcaaaattaacagttgtctttctatcagttgtcgtagaagataaggttccaacactcgaattatctgtgctatttgttgaaaaatcccatgatttgattttggtaccattacttgattcagcaactatcttacccgttcctagaaatgttacattatcaggtaattcatcacgataagtaaatgatgtatacggtgtcatcatatctacacctaaatcaccaacttgttgtgcaattttatagacgatatctgttccagcaaaaagttccttggaagtatcgttataatcaacgttgttacccgaagtatcatcaactgctttagtcggcgtttccggtggagcattccataaggattcagaagataaagaaaaccacatattagatgtatactgataataatccagcatcccaattcgcatatcgatttcagtttggttattcaatttataagtgacaccaccatcagcaaaatgtgatgagccaagataatcatatttataagtagcccaggtcccagaatttacaccggcaaaaattgaaccattatatgttgaatctgactttgtacctgcataaccattaatttgatgatcattaatagtgtagtttggatcataagccttaacagaagtctgacctgctgaggttaaataagcatctgaatactgtccacccttcattgttacaaattcagcggcttgaaagtcagcactataacgagttgcatcatgataattcaaagaaccgattgttaaatagctatctgtacctaaattaacagctgaatcgtcagatttataaaagaatttaacttttacttccatactttgaagcggcatcttaaagttgaccccaccgtataaatcctgacaaaattcaattttagctgatgagttcttgttcttccaactatcattatatttaaaattgtcatattttataacagcataaatttgcttaccttgataggtaccaacaccaccatgactatctttgccataagtaaccgtaattgaagtagtaccatctaatcctgtatcagaataaaaatttgaattaccaggtatatttatactaatttcgctacttccacttggaaaagacgtataaatatcacttgttgaagtaatattactatctgaaatattgcttgaatgttctgttacttttgcagtctcaccaacaatatttttgattgaaagttcacttttacttgcaatgctcgttggatcaatattgtgaacattatcagctctaactgtttttgaaaatgcagttaaatctcctaaagaaaataagaaaatgacaaatgcaattagtaaaaaaaatttttttctcaacatcatcctccctccaataattcttttatttcaaatgataacagccaaagtctaatatacaaatatatctaaatagtattaagcaaccgcttactttaaaattaattatagttttttaaaccgtaacttgcaagaacaagttagccagtcgttgaggacaatcccagaacaggccgttatcaaatagaagttgtggcgctagagagactactgggccatgcggcgaacgcgccgagcttcggcctcaaagttttgctggagtgtgcagtagccctgttgtttgcgaggcaactgattcaagcggtcttgcgtggcctgcacttgactagggctaatgtcatctagggacatgcccttagggaagtcctggcggatcatccggttatgtgcctcgttggtgccacggtcgcaggacgtgtaaggatgggcgtagaagatctcagtttccgtcccagcaaaagcagtatttaaggcggtgaactcgggtccgttgtcggctgtgatggtcttgatgcaagctccccattcgcgcttgattccacgcaatgcatagctcacagagtctgcatctcgtccttcgatcaagcggagaagttggcaacgggtcttgcgctcaatcagagtcaagatgacgctctccttgccattgcgtttaccgacaatggtatccatctcccagtgaccgaactgcctgcgtcgttcaacgaccttaggccgttcctcgatactgcggccagccaggcgcttagccttggtgtggtgctggtgagaggtcttccgcttagtcttctccaacaggtcgatatttcgaatctctaggcgttggtcgtcaatgtactggtacaaagtcgaggcacaaacaagctcttcaggagtaaacagcttgtgtcgcttggcatagccgattgaagcatccggcgaccatttgtcctgcttagctcgctgtacgtaccaggctaagaagacctgtacgctggcgaacttgtcaggacgatggcagctcaagcgtgcagtctcgtaacgtgcctgagcagcctctggcaggtattgtcgatggtagacgcgcttgccattactcttcttgacctgatctactgtacctcgcttgatttcattattaatggtctgcgggcagacgccaatttcagcagcaatccaacgattggacttcccagcttggcggaatccggccacttttccgcgctcgagtgatgttaagtgctgacctttttggcggtgtgtggtatcctgtttctgcatcaagacaatatcctcttccattgtttgtgtaggaacttcaatgatacaggatatctgttcttgatgttttttattgtccaaaaaattttgagacagtggctaacttgattctaaaatgcgcgatggccaaaaatacgtatgatcagtaattttaatatttcattgagagataatgcgctttctaaatgaatacggtatagttaaggtaatgaaaagtagggggttggggacgtgctgactttatcacatttatccaaaagtttcggaacgatgctagcggtcgacgatgtttcatttacggttaagtcgggcgaaatattaggcttaattggtcaaaatggagctggaaagacaacgacctttcggatgatcttgaatttcatggcaccagatacgggaactattctctggaaaggtcgcgcgtttaccgctgcggattatgaccaacttggctatttgccagaagaacgaggattgtatccaaagatgaccgtggaacaacaaattttgtactttgcacagcttcgtgggcgcagcatcgcagacatcaaaccacagattgatgagtggttggtgcgctttggggtgaaaggtaagcggactgataaaatcaaggatctttcaaagggaaatcaacaaaaagtgcagttgattgcgactttgatccatcaaccggaactcattattcttgatgaaccctttagtggactcgatccagtgaatgcagaacttttagaagaaggtattttatggcttaaagaacaaggttcagcaatcattttttcgagtcatgatatgacgaatgttgcgcggattagtgaccggattgtgatgttgcgcgatgggcaagtggtgctcgccggtacaatcgatgaaattcggaatcagtttggccgaacgcaattattcttagaagcaccgttagcacgcgaaactttagcaaatatcaacggtgtttcacgtgtaacacagcacgggcagcggtttgaattaactttggcagacgaaacggttggtaaaacgattttcgacttagcgacacaaaatggctatatcctagagtttagtcaacaagcaccaacgctcgatgaaatctttagaatgaaagtggaggaaggccatgtttaagtttaaggtgatttttaaacaagtatttctaaagaatattaaaagcccagcgtatctaatcatgattttgatgccaattgtgatgctcgggattacgtttggtgtgagtcgcttgatggatcatagcaaagaacccgttagaattgctgttttggcgccgcaaccagcagaacagagtgaattacagcagttaaaaggtaaaacatatcaaatcgatcagcagattacgactcgggaacaagccaccaaagcgctccagaaagagcgaattgatggctatttgttgttgagtgaggaaaaaggacagacaatcagtcgctactatgaacgaaaagatagtccatcatttgatgcgagtgtcttagagaatcagttaaatcagattcatttagtagctttggcgcaacaagcaggcgttgcacctgaacagatccagaaattgatgacgccaactgtcattgcaccagtgacggttaattaccagaatggtcatgaaaagatttcccaggaaaacactaaagaagtgggccaaattatttcaattggaattacggtcttaatgttcatctttatcgtgaattatgctggaatgattgcccaagaaattgcgactgaaaaagggtcgcgaatcatggaaatcattctatcaagtgtttcgattgaaattcaatttttcgcgaagattgccgcgatattagccctattactcacccaaattactgtctatattttagttgggattgtcgggtttcagtttttgaaacagcaactaccgttagcagagttattgccgattattcgtcgtgctttggttgcgccagcaatgtggtatgcaggagtctttttaattattggggtattactctacaccgtattagctgcaatgttaggcgctgttgtgtctcgaatggatcaggtacaacaagccatttcgccattgattttactgggcacattaagttatttgggtggctttgtactggcatcacagaccgatattccattattgcgggcggtgagctatgtgccattgttttcacagattatgttacctgtgcggctggcaaacggtgatgttggcgcgttcggggctagcatgggactcttcatagccatggcgacactaattggactgacttatttagcattaattatctatcgcatgaatattctagtttattcggataaaggtgtttttaaagcattaattgccacctatcagcaactcaaagaatcgcgccagtagaagatttttacaactaattaaagcggattgatggtatgatagagccatgtgattttagtagcaaggagagcgattgaacgatgcaaaaacgatgggtaaaattcggattggcactcttaggggtgacactggtattggcaggctgtcaaagtaagccagcggacaaagaaacgttggtcaaaaagccctatgaaaaaagtgattactatctcggaacgatttgtacattgcgaatctataataaagacaaggaagccgtgctagataaggcttttgcgcggattaaaaagtccgaaaatcaagcaacgttaaccaaatcaggttccgaattggataagattaatgataatgccggtgttaaacctgtacaggttagcaaagatatgtggccactaatggaaaaagcgttacattatagtcaagaatcggatggcgcgtttgatatggccattggtgcgatcacagatttatggcaaattgggttaccaggcgcgcgggtgccagcacaagcagaaattgaccaagcgttaccattagtcgattatcatgacgttgttttgaataaggccaaacgtacagtttaccttaagaaaaaaggcatgcgacttgattttggcgggattgctaaggggtacattgccgatcaagttaaacaagtttttaaggaaaatggtgtgacatcagccgttattgatttaggtgggaatgtgattgttatggggcattcaccattagggaagaacaaaccatggacggtcggcattcaagatccgaaaaaggcgcgtggagaatcagtcggtacgattaaaggccgtgatatttcggttgttacggcagggatttatgaacattatctaaaaaaagacgggcatacttacatttatctctttgatcgccatactggctacccatatgaaaataacctagcgagtgtcacaattatctcgcctaaatcagtagatggagatgccctttcaaatgctgtctttaataaggggattgtcgaaggcatgcagctcatcaacaacaaaccgaagaatatccaagccatcatgatcacaaaagataataaaatctatctatcaaacggtttgaagaagacgtttaaacttaaccaagattcaaattatcaagttgaaaaacaattaccaacgaaatagccgctaaattgcggcttttttgcaattatgggggtcaaagcattaacggaaaaagtggcaaaatgttaaaattgggaaagaatctgcttttgaggaggacaatgatgacaaacgtgcgaatgcaagatgatttttatacggcggtgaatcaagaatggttaaaaacggctgaaattccagcggataaaccagcaacaggcggctttgtcgccttggttgatgagattgatcagcaattaatggctgattttgctaagatgtcgaccgcaaagaacgcattgttacaacattttctagattattacgaactagctgcggactttcaaacgcgggatgcactcggtatgaaaccgatcctaccaatggtagcccgggtgcaatctctcgatagtttagcaacttacaatcgtgggttagctgattgggtactttccgggttaccaacaccatttggcttatctgtcgatgctgacatgaaagacacagcccatcacgcgttgtatgcggaagctagcgacttaattttgccagataagacctattatgaagctgacaatcccaatgctgaccatttattggccgtctttacggatatgatggttcagctcttgcagaaaattgggattgcgcccgttgatgcaacgaagacggttaaattagcgttggcatttgatcggtcactggcaccttatgtgaagagtgccgaagaagcagcggattacacgaaactctataatccacagcctttgagtgattttatgcaacaacaaacgacgcttgattttccacgtttatttagcaaggtgctacctgttcaaccggaaaaaattatcgtgacggaaccgaagtattttgcgcaactgagtcagcttgtgacagacgccaatttcgaaacgttcaaagcgtggctgttagtcatgacagttcgtagttggagcggttatctgaatgaagaggcacgccaaattagttcgctctatagtcgtgcgttatctggtagcaaggaagctcgtccacaacaaaagagtgcttactaccttgccttagggatgttcaatcaagttgttggcgattattacggtcggcaatacttcggtgaagcagccaaggccgacgtccaaaagatggtccaaaaaatgattggtgtttatcaaaaacgccttgaaaaaaatgactggctaaccgaaaaaacacgccaacaagcgattgtaaaactcaaccaccttgggattcatgtcggttacccggatcagattgcccctatttttgcgaagttggtcacagtacctaaagcagaagatgggacattatttgaaaatacagctgactttattcgaacgattgaaacggaaaattttgcgaaacttactcaaccggtggatcgtaataagtgggaaatgggcgctgccacagttaatgcctattattcaccttcgaagaatatcattgtctttcccgcggctattttgcaagcacctttttacagtttagaacaaagtagtagtgctaactacggtgggattggtgcagtgattgcacatgaaatctcacatgcttttgataataacggtgcgcaattcgacgagtatggcaacatgcataattggtggcaagaatcagatttagctcacttcaagacactttcggaagaaatgattgcagaatttgatggcctagaatatgcaggcgcaacagttaacgggaaattaactgtctcggaaaacattgccgatgcgggtggcttgagttgtgcccttgaagcagccaaagaagaacctgatgttgatttggcagccttctttgtcaattgggcaacgatttggcggatgaaagctacaaagcaatatcaacaattattgttaaatattgatgttcatgcaccaaacgcgttgcgggccaatattcaggtccaaaacttggcagccttttacgagacatttaatgtaacgaaagctgatcagatgtacttagcacccgctaaacgggttgcaatttggtaaattaaaaaggtgcgccacaattgtgacgcacctattttagtagtgatgggggataaagaaatgtcagaaaaaaaacgcatgattaatggtcaaatttatcgggcgaacgattcagaattgcgagccgatatgaaacacgcgcgcgtacttactcggttgtttaatcaaaccactgaagaacaacaagattaccgacgcgaattaaccaagtctttatttgcgaaaagtggctcagatttatatattgagccaccatttagaactgattatggttgccaaacacgcattggtgagcatgtgtatatgaattacgattgcatcattattgatgtagcaccagtgacgattgggaaccacgttttctttggacctcgtgtaggactctacacagctggtcacccaacgacggcacaagaacgccgggatgatctggaatatggtaagccaatcaccatcggggatgatgtgtggattggtggcaatacggttgttaatccaggcgtgacaattgggaacaatgtggtgattggttctggatcagttgtgactaaagacattcctgataacgtgattgcagttggtaatccatgtcgggtactccggccgattgatgaggcagaagaggcctactgggcgcagcaaaaagcaagttattttgaagcccttgctaatgaataagtttaccgagtagtgttaaatggagtagtcatcactaacaaagcactaagctaaatatcagcaaactaccgagaaaaagccgctagtactctataaaaagggttctagcggcttttttaaatgtttggtggatcaaactggcagttcactttgctgcgttaagaaacgcaagcgattagtgccaagtgctggtttagcatcttctttggaattggttggaaaaattggaccaatgccaatgtaatcaagtatcggttgattatgactttggtgaagttcttgttcagtgtggcaagatagaccagttattaagccgtgtgctttggccgtttcaattttatgccacgggtgatcgctttggccgacatgaataccatctgcattgatttgaagtgctaaatcgagattgttatcgataataaatgggacttgataatggcggcaaagggcttgagccgctgtcgcatactttaaaatcgcatcggaatcttgcagactaccagcacctttttcacggaattggaaacaggtaatgccggcttgtagtgcttgttcgagaatgtttagaaaatcatccataccggtattttgggtacccgctaccaaataagtttggaacatttcccgggaaatgttagtcatgatgaaccttctgataagcccagtgattggttggtccgtggccgtgaccaacagcaattggattagcaattgcggcttggataaaggctttgctaatatgaattgctgctttcaaaggggtgcccttagctagctcggcggttaaacaagctgaaaacgtatctccagtgccatgtgttcgtttagtagcaattcgtggtgtagttaaccattcatcttgtccatcagcgtagaggacgtaatcggcggcttgtgattgatagtctaaatggcccctttgataatgatattcttggcgcccatttgttggagttggtgggccgcttgtttgaaatcagctgttgtctttatgcggctgcccgtgagaacttcggtttcgggtaagttgggtgtcagcactgtggctagcggcaataattcagtacgtagggtatcgatggcatcgtcggcaagtagctgtgcaccgcccttggcaatcattacaggatcaagggtgagcggcccccaatcataatggcgtagattttcagcgaccgttgcaacatgttcagcatctgccaacattcccgttttgcaggcacgaattttaaagtcagtagccaatgaagcgaattgttgattgattagtgatagtggtagtggcagactggcttgaacgccaagcgtattctgagcggtgatcgcgacaactacattggttgcaaaaacatggcgctcttggatagttttaatatcagcttgcataccagcaccaccaccgctgtcagaaccggcgatggttagagcttgtgggaattcattcatgagtaggcacctcacttagttggacggtatttgctactttggctggggtaatgtggaataaataatcgattaattggggatagaaggtcccaggtagcggtgtttccattgctgtggctactagttcgccggcaacggcaaatgtggcggctgcttcgatagcggcttggtagggatctgcaggatgaactgcaacaaatgcaccacagagacccgataacatatcacctgaaccaacatgtgtttgaaaaagtgaggtaccatttgaaatcagcgtaacgcgttgaccgtctgtaataatgtcggtcggacccgttaataaaattatggtgtgtaaacgattggccgcggccttagcaataatgactggatcgctatttccatgcccggcgtcgatgccatttgcttgccaatctatcccagcaaaataagcaatttcacctgcattaccacgaatgagagttggtgtgtcaagtattaatagttgctcgataatttgctggcggtaggccagtgagccaactgccactggatcaagaacaacgggtttttgttgttgataagcggcggtcattagggccatcatttcttgaatctgtggtgcccacaaactaccaatattaatcgtaatggcttgtgcgatggtaacaattccctccgcttcttctggtgcattagacataattggtgaggtaccgattgcattttgtgcgttggcgacctgatcaattgtgacgccatttgcgacattagcaacgattggattgagcgctctaactttttctaacagtgaaacaaccatataaaaacctcccttattgaacggttgagaattttcaatcgttttttatttcggcccgttggtcaagtggttaagacaccgccctttcacggcggtatcatgggttcaaatcccgtacgggtcatcaataatgccggcttagctcagttggtagagcatcggtatcgtaaaccgagggtcacaggttcgactcctgcagccggcatcaatagcatgtttctaccaagtgctaatcgggataatcagcattgtactgacgttttgttagtataatgcttttttaatattcaatttgattgaaaagcaaccactaaaatagccagttacgaaaatcgtaactggctattacttattgttcatttgcccattgccataatagaatctgagtgcgtccagtcattttttcattggctaagatcgtctgtgcttcagcacgattaacccacagggtacttaaggcttcatccacttcaagtgtacggtctgtttgtttagcttgatcaagagtacagattgctagactaacggcgccatcagtaaggcctggtgaggaataacttggcgcaaagcaatgttcaacctcaataagagagtaacctgtttccgccattaactcacgggaaatggcttgtttaatcgactcagttggttcaactaaaccggcgggattaccatagacaaaatcattaaggggttgtctaaattgtttagtcagtaagacctgtgagtgattttgattgtagcagaacattgcaaccgctgaggcattagctggtcgttttaaagtctcgatggttaagttagagtcacgactgacaaaatgataaggcattaaatcgccgtgttcattttgatacattgcttcgtagtaagttagccaacgatcaggtcgtaatggaataagagatgttagtgtaaaagggttcatcggaatcagctcgctttctattagttcattgtactactgtttaaaggcaacaaaccagttttctaagaacatgttaggtatcatgagcattttctcatttaagaataagcattagtcattttaaatcataaaataacttattttaatgaaaaaatcagtgcaaacaatgcagttaatgttgaaaaaagaattgatttaagattaaaataagattataataacccttatagattctaagcgaatgataagagacttcttgtatagatgagtcgattcaatttaataactatcgaattcttagtttccgtaataataaagttttaaagtggggtattacaatggaagagaaacaagaaaaaacattctttgggcaaccgcatgggctatcaacactgttcttcactgaaatgtgggaacggtttagctactacgggatgcgtgcaattctattattctatatgtattttgctttagataagggtggtcttggctttgacaagacgactgcaatgtctgtgatggcaatctatggttcgatggtttacctagccagcgttgttggtggttggttaagtgatcggatctgggggagcttcaaaaccgtcttcatcggtggtgtcttgattatgttaggccatattgccttagcaatgccgatgggtgcgacagctttatttatttcaattgctttgattgttgcagggactgggttattaaaacctaacgtttctgaaatggttggtagtttgtatagtgaaaatgatcgtcgccgtgatgctggtttcagtatgttcgtcttcgggattaacttgggctcatttgtcgctccaattcttgttggggctgtcggtcaaaaaattgattttcacttaggcttctcattagccgctgtcgggatgttctttggtttaatccaatactaccgcggtcgttctcaattcagtaaagaaaattcaaaacctaatgatccaattgcgccagaagaattatcaagcgttattcgtaaaattgtgattggtgttgtggtcgtcgttgccgtagtattaggtatgcaatttacaggcaacttaaacattgataacattgtcttgatgatttcaatcattgcgattgcattaccaattgtgtacttctcacggatgttgggcagcaagaaagtgactaagaaggaacgttcacgcgttatagcttatattccactctttattgcagctgctatcttctggggaattgaagaatctggctccgttgttctagccttatttgcagaagatcggacaattctaaacattggtgggcatagcttagctgcatcaaatttccaatcattgaatccactatttattatgcttctaacgccattctttgtatggttatggagtgcttggaagaaacaaccatctgcacctggtaagtttgctgttggtttaatcttcgctggtttatcatacatgtttatggcacttcctggattattacacggtaccgctggccgagttagcccattctggttaatcggttcatggttcatcgttgaaattgctgaaatgttaatttcaccaattgggttgtcaattacaacaaaattagcgccaaaggcattccaatcacaaatgatgagtatgtggttcttagcagatgctgcgggccaagcaattaatgcacagcttgtgcgtttatattcaccacaaacagaaattagatatttcttagggattgggattgtgagtgcaatcttcgggatcgtcttaatcttcttcgttaaaccaattcataagttaatggaaggcgttaactaaatattagaaaaaatcttgattatttatgcaataatcaagattttttttgcattttggggttgatttttctgtcagaattttgtaaactaatatagttgaatcgatgagatgaaacgtatggaggagtagcgaagtggctaaacgcggcggactgtaaatccgctccttcgggttcggtggttcgaatccactctcctccacttgattgggctatggccaagcggtaaggcaacaggttttgatcctgtcatgcgctggttcgaatccagctagcccaatactttaaagacatcttgctaagatgtctttttttgtgtcctggattgactttcctccgctcgttcggtatccttggataaataaaaaaaggggtggcagaatgaaaattggatttattggtgtcggtaacatggcacaagcaatgattaaaggcttagtgaaagctaatcaagtcgcaacaacggatattttagtgcatggcggacatccggcgaactatgcggattttgtggctgaacaacggattacagctgttgcggataacaattcagtggttgaacaagccgacatcgtttttttagcggtaaaaccatatattgtgccacaggttttagcagaaacaaatgcagcctttaaagcacatcaaccattgatggtttcaatggcagcaggtttatcacttgataaattagcagaacaatctgctgcagatttaccaattctacgcatcatgccaaatgtcaatgtggccaaccgtacgggaattacagctgttgttgggaatgaacaagtcaatgcagaccaattggctcgtgtgaaggatgtccttgcacaactggggggcgtggttgaaatcggcgaaaaagatttcacaactttcagtgcgcttgccggtagttcaccagcatttgtttacctattcattgattcaatggcgcgggccggcgttaaacacggtttaacaaagaaagccgcaactgaaattgcagcccaagctgttttagggagtgcccaaaacgtgcttatgagtgatgattcaccttgggacttagtggatcaagtttcatcaccaggtggcacaaccgttgctggcttgttagcaatggaagaagccggcttaatgaccgccgtcgtcaaaggcatcgacgcaacaattgcgaaggatttagaaagccaaaaatagagtgctctcaagcatgtaaaaagcgtaacctgatacaaatactgtattgggttacgcttttttatattattttgtaaagtggaccatctcatgacagagttggtgggtgagtaagctactttctggtgggacaggatttgcgccgttagtttcaagggcagtaataaacgcatcaatcattggcgcaaagccccgcgtttcaagcgtaggcatccagtcagctgcaacttgaatgcgactgtcttctgtcgcttgtgttgtgtagcgcgttagattatcgacagtgaataacccgtgtggtgtctggagacttgcaatttcttgattggtaccactttgcatatttaaagtcgcgctgattaattggcgcggtgtttcaatggttaattgtgcgagttgtaaattgccgtttgcatcctgctgacagtatggacggattttgtaattggtacctagtgaatcagccaagaaaagcgccgtatcaatagtatgaatcatcaggtcataaatggcaaagggcgttggttggctcgttgccacgcgtgttttagtgatgttgatcagttgtttatcaggtaagtgatttaatttttgcaaaaatggggcaaaacggcggttgaagccgaccgttaagagccgttctttgctagccgcgagtttgtataattcggcgacttccagtggattttcacttaagggtttatcgacaaaaacgtgtaaaccatggagcaaggcctgtttaacatattgatagtgggttgcagttggggtgtgaatgaaaactgcgtcgagtggttgttcgagtaatgtgtcaaatgataggcagccactttctaaatgatattgcgcttgaagctgcgctaatttagccggttggcgcgtacataagacccaatcgacccggtcttgcatctgcgccattacaggtaaatatgctttttgtgcaatgtttcctagtccaataacaccgatttttaacatcattaaactccttaatatgaatggataaatatagtatagcaaattaacaagaaaacggttcaaagtttagtcggaatcccttgtttttttggtctataccatttatactagaggtaatttaaagatagaggtggatggataatggcagtaaaagtattaaaacatgcggtaatctatacaggtgacgacgttatcgaagacggttatattcgtttcgatgataaaattttggcggtgggcccaatgttcgactacaaggcacaagctggcgaagaaattcaagacgttaaaggcaagacaatcattcctggctttattgacgttcactgtcacggtggttatggttttgatgcaatggacggcgatgctgaccaaatcgacgaaatggcaactaagatgatgcaaaatgaaggggtcacaaccttatttgcaacaacgatgacgcaatcaaacgaaaacattgctaatgctatgcgcggtgttaaagcagcggctgaaaagaacccattaattcaaggtgttcatttggaaggcccattcatcgcaccaatcttcaagggtgctcaaccagaacaattcatcaaagatccagacgttgatttattggacgaatggaataagttatcaggtaaccgcgtgcgtttaattacttatgcaccagaagatcctggttcaaaagcattcgaagactactgtttagcacacaacatcgtgccttcagttggtcatagtaatgcaacgcgtgaacaaatgcttgaaagtaaagcaacgcacgttacccatttatacaatgcccaacgtgaattcaagcaccgcgaacctggcgttacaggtcacgcaatgttagaagacaacatgtacgctgaattaatcgctgatggtttccatatcgtgcctgacatgattaaattagcttacgaacaaaaaggtgcagaacggatcgaccttgtgactgattcaatgcgggctaaagggattgctgaaggcgaaagcgaattaggcggtcaaaaagtcattgttaaagacaaacaagcacgcttagaagatggcactttagccggatcagtgttaacatatatcgatgccttcaagaacatccaaacattcacaggttgtgaaacgtttgaagccgttatgatgtcaagtgtcaaccaagccgaagaatttggcttaacacaaaaaggtaaattagaagaaggtcgggatgctgatttcaacatcttagaccatcagcaaaacttagtcgcaacttacagctttgggaacggctatcaacattaatatttaggagtgtgtcccatggaatcacctgtttatattcaaattcataatcaacttaaaaaggatattgaagccggcaagtggtcgattggagatcgaattccttcagaacgggagcttgctttaaatttcgaagtctcacgaatgacattacggcaagccgtacaaacattagttgacgaagggattttggaacggcggattggggctgggacatatgtcgctaaccaaaaggtgcaagaaaaaatgtccggcgtcactagttttaccgatctaatgactgcccaaggtaagcagccatctagtaaaaccatttcgttccacattgccaacccatcacttagcgaagctgaaaagctccagttaaaagatggcgagcaggtgctccgcatggaacggattcgctatgccgacaatgtgcccatctgttttgaagtggcaaccgtgccacaaagcttagttgccgatttcagtaaagctgaaatcacgtcttccttctataaagcattagccgaaaaagggggctacgaaatgggcggtgcacaacaaaccgtctcagcccaactcgcctcagaacgaattgccgaatatctcgacattaagcgtaatggcccaatcttgaaattacgacaagtttccttcttatcaaacggcgaacctttcgaatatgtccgcacccaatatgtgggcgaacgatttgaattttatttagaaagataatggaaaaggattcagttgtgtagtaatacgcaactgaatcctttttgtataaaaaagtagacccgtttaagttggtctagcttttgaaaatattaatgctattggcaaattacaagtttaattcgaacaagctcggaatttctcaatagcggtttgtagctggttgatttttaatgggcgattattaattaagtctagtgattccagtaaggtatcttcagtaatttgactgaagcttgcacgttttggaaagaaccagcgtaacctacggttaaaatactcgttactaccacattcccatggtgaataggcatgacagaaataaaccgtcacgttatatttagcttcaagtacttgatagtttgaaaattcttttccatgatcaacggtgattgatttcacttgcgaaccgaagactcccataaagctatcaaatgcagtatttagcgcctctgaagtacgattagccactttaagtgctcataagaaacgcgatttacgttcaacaaatgtgactaaacaagctttagaagcacctcgtcctgataaaacagtatcaacttcccaatgtccaaaatcataacgattattaacattgattgggcgttgctcaattgatttaccagttataaatgtcccacgtttttctttagagcgtttctgataaatgttacggtttggtagattggttaaattaaagttgagttgcccagtattaagccaatgatagatagaagcagtcgtaaaattaaacatactagcaatcatctcaggtgacctagttgtccacgttgaaattgggttaaagtagaaatgctcaaagtaatatctcctttatggttggattaggctactaccattataagagattgctttgagttttttgttcggattaattttagaacttgccgagcattaatattttgatgacagttcatatcatattttatgacagattaaagtgtaacttctacaaaacatttgtatactttaagtatatcacacaacttatcgtctgtcaacaactatttttaattaattattacttagaagttataactccttaagcaacatataatatgttatcacgataagatttaaataacaagcgttttttaaaatcttttttatttcgtatcgctgagtcatcaaccatacgtccctcgtcgagacaacttttatatattaccaagattaacaggcgcggtcaagctttttattaaaaaagctttgaaaagttaccagcaacgtttcatcgttaccaataacccttcaaagctctacggtatccctattgtttaatgagtgattcaacatccaaaatcttatcaatccagtcaccttgatagaagtcttcttcatgagtaacaaggagtacgccaccctcgaaggcttggattgcttttcgtagtgcattcttcgtatcatcatctaaatggttcgttggttcatctaatagaagaaagttgcttgatgttaatagtagttcggcaatcttcaccttcgattgttcgccaccactaagttgtttcaaaggcttcatcgcttcttcggcagttaaaccagtccgcgataaaacttggcgtagttccttttgtttctgatcagggtattcgccttgtagatactgtaatggcgttaccatattattcggccacttcaagtcttgtttaaagtaaccaaacttcaccgtactggcaatctcaaagtccccatcgattgctggaatttctttaatgatcgttttaatcaacgttgatttcccaatcccattaaaacctttcaagaccaccttctgatcacgaccaattgaaaagttcaacgctggtagtaacgcgcgatcgtaaccaatctccaaatcattagtcgtcaatagaatctgactggccgttgcatgatatggaaagcggaagttagccttcacgcgattacttggtggcgtcaaaatatccatatgtgccaattgtttctcacgactcttggcaattgtcgaacgggagcccgctttatacttgcggatataagctttcgttttttcaatctttttttgttggttctcataagcctttagataactagccttattctcttccttttgccggaaggcttgttgtagtgtgccggtatacttcgtaatcttaccgaattcgatatcggcgatacaggttgtcacccgttccaaaaagtcataatcatgggagattgtgataaaggcgccttcgaaatgattgagataatcactcagccaatcaatgtggttcgtgtccaaatagttcgttggttcatccagtaataacatatcgggttcttctaatagtagtttcgctaaaataatcttcgaacgttggcccccacttagttgtgatacatcatggtccatccctaatgcatcaatccccaagccagtggccacttgcataacgcgcgtatcaatatcatagaagctttttgcctctaatagttcttgaatcgcacccgctttttcgagcaattggtcatcaaggctctctgcatagtccgcataatattgactcattaatttttctttcttatataaatccgcaaaagccgtcttcaaaaattcaaagatcgataatcctggtgctaacttcgcatactgatcgagataaccaatcttcaaattcttttgccacgtcacttttccttcatccggaagaatgacgcccgtgaggatattgattaacgtactcttacccaccccgttttggccggtaatccccatatgttcgcctttattcacttgaaacccggcgtcgtcataaagttgtttatctaaaaactgttgtgttaggccttcgacttttaaaatactcattgttttattcctactttctttccaaataaaaaacaggggcagcatccgctacccctgtcatgattacaatcattgactatcgaccactccatccatagtcactacccaaataaaccactgtcaccagtcgttaaatccagtaatgtcctatagatgacttttaatcaatattaggctctgcacgatgcgtcatcttcaaatatacagagcgaagcttcataattaatggtcgttcaattaacatgtaatcgcacccttcaataagttagtcctatcctaacatagaacaatcgtccatgcaaaagccttagctaacccgtgcacgcaacttcgctaacagctgtgcgcgtttgcgccgagaaatgattagacgcaattcaccgcggacaattggataatccttagccctaccatgcatcattgtcgctaagtcttggcttgttaatccttgattagccacttcaattttgatcatttctgctaaatacgtactatagaatgcattaaacccgacatataagcctagtactgcactgattagaatcgcaagccataaattgaaattcaaaatcgtctttaaaactaacatgccacaaataaacgcaatgaccgtggccactatccctaatatgattgtatgtcttggggcgtctttcatctgctccaccttcttaataatgattaatcgtttatatttcatttatattatacctaattttagccgcaataagcagtaaaatcacttaattcttcaaattaaaaaccgctaacgtcaagcgagacagtcaaccacgtttactagaatgagaggctatgtattgtaaaaattgtgtatatattgtaaatttttctgtttttatccccgtaaacagtctagaattgtagtagtgcttttttgaataatataactatattaagaaggataattgaatctatatgaaaaacattgctttgaacatccgagattttttcttagatgacaaactactcttagccgctgccatcgcagccattgtcacctcatttttcaaccgcccacaacttagttacgttaatttccacgtgatcgtcagcgtcttttgtattatgacgctcgttcaagtttatcaacggctccacgtgcttgattacttcgctcgcgagttaattatcaaaagccgttccaaacgagccttgatgcagatgttattagcactaacgtttgtcggcgcgatgttcttaaccaacgatatgacggtattaacgttcgtcccgttattcatcttaattgcgcgtcaacttgaattttcaccaatcttaccggtgacgctcatcacgatttcggctaacctcggttcttcattaacaccgtttgggagcccgcataatattttccttgtttcgttttaccatatgacgattcgccatttcttcgaatattcaattcccgtcttgattgtcagcgtcattatgttggcagcaacgaccttcctcttcccaaaagaacccatcaaacttcacgggttacatcccgttgaagttgaaaaagggccactgtggtatttcgttccattaacggttgtcgttttcctcgcagtgttctcattaattccattatgggtgacaccaattctagtgattatcgcgattctagcgtttgatcctaagttattcaaaacagtcgattacggcttattactcacattcttctgtttcttcatcgctgttgggaatttaagtcacatcccaacgattgccacattcatgcgatcaattgtcggaacagcaaaacaaacctacatcaccgggattatcagttgtcaattgattgcaaatgtcccaactgaaattttactttcaagcttcactaaccacagccacgcaatgttcttagccatcaatatcggtggggtcggcacaatgtttgcctcacttgcaaacttgattgcttacaaacgatttaagaaaggctggggcaaagaccttggtaagttccttgtcgttttcactggcatgaacttcttattcttaatcattttaggggtattcggctattttctcatctaattcttaaaaacagggcaactatctttacgatagttgccctgttttttgtcattttaacagtaatcgtcatgatagcattcccattcgcgtcttactgccgatcaacgccatcgtgacgccctttaattaagttcctaaattttacaaacatatgactaacatgacaaattaccccatttctgtaaagaaactgctatttaattgacatgcagcattgatatactctcctagttccaaaacttacctaggagtgacgctttattatcaaaaacaaaccattcttgttagctatcggccttatattgctgatgctaattacaacgaatatcgcgcgtgccgcattaaccaatgaagcagcaccagaaacgaaccaccctgtccaaaagctgatgtcatctaaagccattgaacaattcacggggcaacctgcccaagcagctgaaacgtcactggtcaaacacgcaactgttctaccaacagacaaacccgttagctgtccgattcatccagatcctgattccgcagaaattaaggaaccaacgcccgcccctgagccagaactagttgcggccccagcacctgccgaaccaaccttaattgacaaagggacattcaaattaaccttttacgatcccgcggtccttggcgcaacaagtatgcccggtggaatgtacgccggagtcgctgcgcacttgggcgttatcccccgcggctcacaaatcaagatcacattaagtaccggtgaagtatggtaccgtgttgtcaacgataccggaaccttcgccgcttctaactcacaacaattggacgtcgcaatgccaaattgtgacatcccctctgccggtgtcttaaatgccaacgtgcagattgtccaacctgcttaattcaaaaaaagccaaccattcagatattacctggatgattggcttttttgatgttcaatttagaaataatcccataacatcggtttcgtatgactaaacgcagcactgagttgagcgatttgctgcggtgtcccttgcacatgcccaaagtgtgcttgactctcaagtgtgcgataccccaacatcgccttagttagattttgaatcgtaacggtgatgtctgcggtccccgttgctaattttgtcacagcagcttgtcctgcatgaatacttaactgccataagccggcattttcaggtaagaaatcatcttgaaccgcaatcgttaccgcagatagttccgctacttgataggcataacgcgcgaagaaatcagctagtgacacaatccgtgccatcatataagggacggttgtcgtctttacgattgtgggatcaggcaataaatcagctagcgactcagtcagtgcactctcatactgaattatcgcataagctgactgatgcttaagaataaagctcaatagctgttcttgacttgcaactgtcgaggtcatcagttcttgaatcacaaacgtctctggttggcgcgtataaatcatataccccgcgacccgtcctgtatcttctcgatagaccgccacttcccaatcactatgcttcataacatcatattgccaccaccaatcagtccgctgcacaccaccgacttgattgtccggatgctgattgaagaacgcatcaatcaacggcaccgcttgcgccaatgtcatccgtactacttgtcctgcactcggtgcaaatttcaatcgtggtaagtcagccgtttgaatttcaaagtgcgtccgatcaaaagtttgttcatagccaaaccgacgatagaagccgtatgaaaatggcgcgagatacgaaagcgtcacaccttctgcacgcatgtgttcaaacgcgagttgcatcaatgctgcaatcccacctttgcccgcaaactcggggtaactcgcgacataaccaatgccactcatcttaaaggtttgcccattgagccgtacgtcaaacggcgtcgctaataagccacttgccaaccggccgtcatcaaaaacgccaaaccctgcactatgtgtatacaactgtttgaagaattcttggcgcttagcactatccggtttattaaacgcatattgtgctaattcataaaatgctggttcatctgtttcaattaactttcttttttcaaccactgcacattcctcctgccatcacttatctttcactataagtgagcgagcaacaagatgcaagcgccacctttgtgattagaccgctttttgcgcataaaaaaaacgaccttttcttgggagtggtcgtttttttatagggagaaatctatgggtattagggagttatttcgttaacgaaattgcacgaagttgttgtgaattcactagaattcgttgcatcaactcgtgaaccgtaaaacgatcagttggtgcatagttcaagattaagatatgcacagtttcttcacatttctcaatgaccttaccgatatacgtcgcagacataatttcgtttgattggccgcgaactaaatcacctacttgaatcgccatgtccagttcacctcgttaatttatttaaccatgacctcattataacgaaaccgctttataaaatcaactatttacttatcgtcataattagtagatgcttgtgattggttaagcagattgcctatttttgaatcttgcgatagtcagcatcgaaataccggccttcttgaatatcttcaatcataccttcataaggcgcttcgctaattacgtcttcgttattttgtcctgcatcacccatataagtgattgtggcaaattcaggcactaacatcttaggatatgtttcatatttttcacgtgattcttccatgagtgcaatgtgatcattttggtaggtcactgtgatttctggatgttcttcaacccatttagggaagaaaatcatgccgtgtaacttgttttcgtttggcatgaagtccaacgcaacatcagtcccagttggttctgtccaagtaatcttgaagacgccgtccgttaacttaacgatgttggcttcttgatcacgaacccaacgacctgcaaccatcccaccatgaattcggtagtcaactgtgtggtcgttctttgcataccattcatactcccaaccattatcgtaagtgtaaatgaaatgcgtccctaagaaatcttctaattcttgtatgttgtgactgcgtctgcattagtaatgtctaattcggctgcatctgtccccacatattcgatttggttttcgtctaataaatgtcgtaattcggtccctaattgaccatttgcaccagtgattaaaattttcatgagtgatctcctcgcttgatataattcaataatttaggtttcgttaaccataatacaacgccgtataacaaaataccaacgccaacttgtaaaactagttgtaacatactaaatggtagcgttaggttcaaataaagaactacggcaaacatcatcagaccacctaaaaggtatttccacacttccgccgtcatttgtcgaatacttaactcatgccgaacgacatagaattgataggccgttacgctgatttctgaaataactgtcgcaatcattgcaccttgtgtccctaaccataaaatcattggcacattcaagataatattgacaacagcgccaaccgtcaccgaaatcgtaaattctttgttgtgtccggttggcatcaagtattgcacacccaagacattactccaggcaatcattagaatcacgatcgactcgaccatcatcaatggcccaacagcggcgaaatccttgccaaaaaacatggtcgcaaagttcggcgcaatcgctgcaatcccaaacatcatggggactgaaaccgcactgacaaaatcaaatgactggtaaagatactttttcacttgttcgtgatcacctttggcaaacgtattggcaactcgcggcaacatcacagttcccgttgctgtcacgattgctaaaaccattttgacaattttatcggaattatcatagaagccggcagcttcaaccgaaaccattttcccaaccatggtcttatttaagattaaatagacctgtgtcgcaatttgcggaataaacaagactaaagatggttggaaatgccgccaaatttttaatttatgccagtcaggcatatcaatgtagtgttttaaatatgggaataacgttaaattaccaatcaattgcgagattgataaaattgcaatgtataacgttaaatccccctggttcttcacaaatatgaagatacaggcaagcgagattaacttaatgatgatgtttcgtaaaaccgttaccttgaagttctcaaagcccataaagaaccacgagatatcaaatgctgccgcaacaatcaaaatcgcttgcatcaagtaagcttgatgatagtctttaacaaaccataaaaagccaaagaaaagtgctaatgcagccacaatcgtcactaatcgcattagaaaaacttcccaaaaaatttgagaagctttcgctcgattatctcgataataagcaatttgccgatttccatatagagataccccgatactcccaattaaaataaagtactgcgtatttgaattggtgaaggagttaatcccaacgcccgttgggcctaaaacccgggcaatatatggcatcgtaatgagtggtactaacagtacaaatacctggtagaacacattatagagatagttcttaataatcttcattgattaatcctttaattcgtccttaacgacttgtaatgctgcatggatcacttggtgcatatcataataacgatattggcctaaacgaccaccgaaaaccactttgggttctgtcgatgataggtcacggtaagctttgtacaaacggttattcttatcgttattgattggatagtaaggttcgtcgccacgcgaccagttagcgggatattctttggtaacgatggtcttgttcttgtcacctttaccgaattcaaaatgtttatgttcaatcacccgcgtgtatggtgtttcagcgtccgtgtagttaacaaccgcgttcccttggtagttatcaatatccatttcttccgtttcaaaacgtaagctccggtattcaagttcgcctaattgataattgaagaactgatcaatcatcccagtaaagatgactttatcgtattgatcaatatattcttgttttttatcgaagaaatcaacaccagtttcaacatcgattaaatcactatctaacatcttttcgatgatttgtgtatacccaccaattggaatcccttggtatgtatcgttgaagtagttattgtcataagttaaacggactgggaggcgacgaataatgaaagctggtaattcggttgctttttggccccattgtttttcagtataacctttgatcagttttttatagatatccgttccaattaatgaaatggcttgttcttccaaattttcaggtgttttatcacctaacaccttgcgttgttcagcaattttagcggccgcttcagcgggtgtcgctacgccccacaacttattgaacgtattcatgttgaatggcaagttatagatttcacccttgtagttggcaacagggctattggtgtaacggttgaattctgcgaattggttaatatattcccagatttctttgttgctggtatggaaaatgtgggcaccatattgatgtacttggatgccatcaacttcctttgtatagatgtttccagcgatgtgatcccgcttttcgattacttttacatggttcccacgtttggccgcttcatatgcgaaggttgcgccaaacaggccagaaccaactactaaataattagtcataaatatatacctcaccatcttttaaattatttgtgattttacgattcaaatagtgtctatagttaacaaagaagaaaaacattaaaataaataaatcaaatgaccattggatggataacattcctaatactaagaagataattgtgaaataaacggcactatcataaatcgcttgatcgtactgatatcctgtgatttgatgtatttgtaaccatttcgttgattttttcaaatcgagtaatagatgaataatatatatcacaataatgattccaataatcagcccaaattgcgctagcacagctccccacgcactttgatctggaaattctttattctttaaaaataattgatattcagctagttgtttaactgatgatggtgcattgatgaaattaaaatgactagtttgaccaaagccaacaccaatcaacggattctttaaaacagtaataaacaccgcttgtgttgctaatagccgcattgttgttgaatcagaatccgtcttaccaactgtaaaacttaataacatattttttaacgctggtactctcattacgattaatgctaataataatccagcaataacatacagaacgattagatttaaccgttcccgacctttgacagcccatagtaaaagtaacgccattacaacgactgccagaataccggtacttgtcttagcaagcaccaacacgcccatcaatacagcgaataacccataataaaaccagccatgatagcgactattcggaaaaaataggttgatcttatttttcatcgcgctaatgatgaagggggcaaaaccaatcaccaatactcctgctaaaaatccagattccgcatataacccatttacccgttgcgtactttgcgtgtaactaattttttcaaaagaaccaggatttagaatattatgatattccagataccgtccgattaattcgacgatactctctaaacgaccacctaaaaatacataaataatttgaaccagacaaatgccaatcaataggacaaatgcccaaaaattccccgttacaatctttttaatctgataatcattccgcatcaataggttcataacaaaatatagaatcaaaaaattagcaactgtaatcatcgcaataatgaacttctttaaaatactaccgattccatagccttcatttgttaatccaataaaagctagtagttggctaagtgcaagcaacccgatgaaggcatagtgtctaagctttaaattatccaacggttctaaagaaatatggtccactaaccgtcgataaagaataataagtatgcctaaaaaagcagcttgtgagaagaatgggatatttaaaatatttttttgaataacactaattaaaattaataactgttccataccctacctactatctaatattaatcaactcgtctaatctgcggattaaaccctaaaccagtaaacgtcccttttaagatagcaccagcccttttaaaacgactatccttagcttttcctaacgttgaaaatgcataaagaatatgacgaatggttaatttgatggttgccccttttcccttatataacttactgatgtaaattaagtttctatatagataaaaataccgattaatacgatccttcgaatcgttaaaaatagtaatatccgttaaattgttaggtgtcttgtgtaccacaacactgtcaattacaaaataagatgatttcgcctgactgactcgaattgtatactcagtatcatctccccagatgaaaagctcttgcgttggcacgccatattgttttactatttcccgggttaagaaaaccgaaacaaatgttccttggctgacagacactaacccatcattaatcttgtctggccattcaaatgcaggcattggcatattacatgatgtgccatccatccagcgaacattactacataagaagccaaaatcatcttttaagaatgctgctttatctaataactgatgtgctgcatttgaattaggaatcgtgtcatcatccataatccagaaatattggtcatctgtttgttcataagccatgaccatgccatgtgcaaaaccaccagcgccacctagattttcatcagaattcttgataataaacttatcagccgataaagttgctaaataatcagccgttccgtccgtacttttattattcacaataacaatgtgggcaacattttcatttttttctaatgctgctaaacattctttcaataatgctagtcggttataagtaactaagaccgcacaaatattacgattttttgattccataactaatcctctctgattgttgcgataatttcagcatgataatctggagcttccgattcagccacttgacttccaccttcaacttcattcacataccgatcatttaaagcaactctttgtgtggccttcatttgataccactcatactctaaatctgcgtgtcctatatcaattgcctgataaccaagcttagccaagtcataagccataactgttgcggtgggccctaatgcaattaaaatcaaagcatctgatgctacctgctccttaatgatatccataatagcgtcgtattgatcaaacgcattctgcgcagggcctaaaatgcgtttaacagacttagcattactcaataaatcattaccaacaccaaagcgcgttgcttgtccttctacaataactacttcacgatcttgccagatttgtttgagtaattcaaaataatacgccgtttgacttttatcacgtcggtcaatatagaagcgactcatgttcgcatcataaaatactgattgagcttgtaaataaggacgccaagcatgattgtaacgcgctattaattcaatccaagcatttttattttggggcatatactgactgagaccgttaaaaacatctggtatacagattgctaacttaggcgcatcagtcgctgtaataacctcttttaaacgttcactcaatgcttcggatccttcttgaaaagcatagctattctcattcaatagccactttaactcaccatcgccaaaacgagtgaccgacattttttgcactgtaatttgctttaaagtcgtttcaagaccaactacttttggtttatcagcagagcctcgatacttcaaatatcgtccaagcaaaataggatgttttaatcccatcacaatattgtacattggcgatgttagaaaacgattatacaaatttgtatttttaatcctctccatttattaaatcatcctattctgaaactatttatttttattgaccgtttttagcgtagttagcttccacggctgctttttctgcttgccaccagtcttcattgtcacgataccagtcgatggtatgttgtaagcctgatttaaaatcagtgaattctggttgccagcctaattcttcccgtaatttcgttgaatcgatggcatatcgtaagtcatgacctgggcggtctttaacttgatcgtaagcatctttgggttgccccattaattctaagattaattccaaaacatctttgttgttttgttcgccgtcggcaccgattaagtaggtttcaccgattttacctttggttaggattgcccaaacggcacttgaatgatcattcgtatgaatccaatcacgcacattttgacctgaaccgtaaagttttggtcgattcccacttaaaatattggtaatttgacgtggaatgaatttttcaatgtgttggtaaggaccatagttgtttgaacagtttgaaatagttgcttgtaggccgaatgaacgcacccatgcccggactaacaagtctgagctcgcctttgatgatgaataaggactacttgggttataacgcgtttcaggcgtgaatttttcaccaacgccttcgccgtgccctggtaagtcttcacgcaatggtaaatcaccgtatacttcatcggttgaaacatggtgataacgcacattatacttgcgacaagcttcgatcaacgtatatgaaccgatgatgttcgtttgaataaagggtgaaggatctttcaaagaattatcgttgtgactttcggcagcgacagtttgatgaaccgaaggttgtagtcacagataaagccccctctattacaagtgcctttaagaaactaaaagaatacggcttttatcaagggacagaacatcgtaccattaaatacctgaataatttgattgaacaagaccatcgtccagtaaagagacgcaataaattctatcgaagtttacgcactgcctcacccacgattaaaggcatggaagccattcgaggattatataagaaaacccgaaaagaaggcactctcttcgggttttcggtctgtactgaaatcaaggtattattgggaatcccagcttaaatcatagataccgtaagggattttattctttatttaaaactttgcaacagaacccattttgatatgctggaatttcttttctgtttttgagccaatttcgtcaagagccagtattttcacattttcttttatttatccaccaatcaaatcacgacgacggtagccaacgtagctaacaattgtaatcatgagtgctacaacagtgatgattgccaaatttgtccaattgggtgtatttggttgaacggtgctgcttgctgtcttcatcaaattgttgaaaatattgaggtgtttaacccaatctggaaattgtaagatatttccgataaagccaacaaagaatgtgaagccaacataaatccaaactgtaaagcttgcacgtggcaagaaggccatcaaagcactcaagatagagagtacgaacaacaaaccaaccatccatgccatgccaccgccaaagattgtacctgcagacaaagcctctttattgcccatttgtgaaacataaactccaaatactccagcaaaaattgcaaatgctccaagaacccaagcaataatcgtgtagtttacaaagactttcaaacgtgacaagggtaaagcataaagttgttcttgacgattatgacgttcttcggataccatacgtgtcaagcttgtaatcgcaaaacaagtcgcgataattgcaatgaccatgtaaactgtgccaaggaattgttgcgccatcattgttgaattggcatttgctgaaatttgtaattctctttgaagtaaattattttgacttgatgaggcgccaccaatcagactaccgattttggaaatcattgaaccataagtgatgccgagaacgaaaaggccgataatccatgcaattgctgctgtgcgttgttgacgtaaaactaaacctgtaaggctttgcaacgttttgccagcatgtacttttccgcgtgcttcaggcatataacctgctgcaacatcacgttttacttcgaacatataggcaaaagccaaaacaataaaggcgagaatgactgtaaaaacaacaggtaaccagttatttttgacataaacatctgtcaaataactccaagacaatggattaaaccatgaaagcttgatattactgatatctgtacccatacgtacgatataaagtatgaagaatacaccaatcgaagcacctttagcagagccagcttcagcgaagatttgcgcaaaaaggagtgcaatcatcccccacatgaagctttgacctgtgatggaggctgcgaacaacaaattatttgacatatctgtcattccagccgcactttgtgcttgaatagagcctgccagcaagaaagtcaagacaatttgcaaaagtagaacttcaatgacaacagctgttgtatttgctaattttcctatttggaatgagcgtaaaagttcggtaatgccttcgtcttcatctttacgtgtacgattgaccacgtaaacgattgtcacaatcgcaaacaccatgaccgtaattaacggcattaagccaccaaatgctgccgcacctgtaaatttatctggatttgtaaccgaagttggtccaaataagctgaccaacgctggcccgctaaagaaggtgtacattgaagtccgattggctgcggtaatcgcaagttccaatttgcccacgcctgaagctgcataggcaagcaatgccaagccccagaaaatgaattttaaccagtcgcgcttaaaaagcgagcgcatcattaggcctgtattattaaaaggtttcatttcttatctctcctataaacaagatgtaagtctgactgcattgaaatcttgaaaaatagtggaatctatgtttctgtcaacggcaggttctagatttcaatgaggacgagctcgattcaattcgacttatccgcgtccttgtgtgtagtggtgcataaacagttcttcaagcgtttgaggattgctgtcaattttgaccacatcatattcagtcaagactgcaagaatttcctgaaccttgtcagaatctgcctggaatgtggccttattactatcaaatttcaaattatgaactgcattaagtcgttcaagtcctacggcaggtttcttagtttctactttgaattcgtaacgtgtcaaatgacgcatttcttcaagactaccgtattcgacaatttcaccagctgcgataatagcgattttatcacacaaacgttctacttcagaaagaatgtgacttgaaagtaagattgctttgccttcagctttgatacgcatcagttcattttggaaaacagcttccattaatgggtcaagtccgctagttggttcatcgaaaatgtaaagttctgcattacttgctaatgctgcaatcaacgctactttttgacggttaccttttgaataagaacgcgcttttttctttggatcaaactcaaattttttgattaattcatcacgtcttgctgcatcaaaactgccgtgcatatgcaagaacatgtcaataatttcgcctcctgaaaggtttggccagagatacacatcaccaggaacataagcaatatttttatggatttcaatagaatcgttccaaacatctttaccaaaaatctttgcggaaccgccgctcgctttgataattccgagcaaggcacgaatggttgttgatttacccgcaccgtttggtccaacataacccaaaacttctccttcgttgacatcgaaagttacatctttaagtgcttgaaatttaccaaacttcttttgaagtctttttacttcaactatcttagccataatattttcctccaataatgactctaaccattttaaaatgatcgtattccaaaatttcatgagcaagtttaatgtcaaattgattttgaactttaactaacattgcagttcatattgtactacttatttttaaacagttcaagaaaaaagtatattttttaacttttttcaaaaatagtttattttggactatcaacaacattgggttcatattgtaccgtttttatggaagtggttcataaaagatgatataatgaatatatggtagattgcaagaattaaccgaacactgcaaactgctgaaaaacctttcgtggtgattgccagttgagtgttttcattggtctcgcattgatccaatgattaatttgatctaattctttggcgctaactgtttcaattttgcgttctttcggtataaaacgacggacgtatcgatttaatatctcattactcccacgttcttctggtgaatatgggtgcgcaaaatagactggaatgcctagtttttgctcgatttcgttatattttgcaaattctcgcccacgatcaacagtgattgacttggcatttttgatcccttgaaaaaaacgaattaagactggtgtcactgcctgactattgcgcccagtgacccgtctcacgatatgttgtcggcttagtctttcagtaattgtcaccagcacatcgccacgtcttttacccgattgcatggtgtcaacttcaaaatgtccaaaggtttgtcgtgctttcacactttcaggcctcgtttcaatcgaacgaccatgcacaaatacttgtcgtctaccatcagattgacgtttttgacggatacctttgtcaggtaaatcagccaatgatagtttgagtcgaccagcattgagccaattataaatcgttttgaaaggtaaccctaaaacatgcgcagcggtttctggtgaccacttcaatataccaatgtggtgattcaaaaagacagcgatagctggtgttagcgtgtcatgacgaccacgtagatgacgttttttcaatgccaacgcatgagcaatctcagctttatagggtgtaacttgatgaatttcaatcgaaacggttgaaggagagcgtttaataaagcgcgcaatggcacgaacagaataattcaattcgagtaaagtttgaatgacagtacgttcttgagatgataaactagtcatgagtcgcagttcctttatggttgttttggacaattaccattaaaggcgctgcggcttttttattcaagtgttcggtttaattttacaatctaccatatatattttacaaatcgcattaaatcggaggttataaagaatgaaccaaacggaaaaaaagaaaaaagccattttggaagtgacttttgctctattaaatgaaaaagagattaacaatattacggttgatgaaatcgctgaaaaagctatcgtatcaaaggttaccattttcaaatactacaaaaacaaaaaccatctgatgaatatcgtcattatgcgcgcttttgagcacatggcaaaagaaatcgaagaggttattaaaagcaacttaaatttcgaggaaacttatgaagccattacacgcatgaaaatttcccaacttgaaaaatacagttcgattttctcagaaaatctgatgacacaatatacgcacgatcccgaatttttcgacaatgatgcaatcaacgctcaaatggaaatttacaatgaactttttgaaaaaggacaaagtgagggtaagattgattcaaatctgacaaaagaagactttatgtttgtcattaatattttccttgaaggaatgaaaagcttatctgccgatacacttttcaaacgaactgatttgattacccgtttctttgtcaatggattgaaaggatagaaacttctagctgcagggagttttttatttataaaagtattaacatgttaatgcggacagaatgttaataagcttgcgaactgttggaaagctccacaatacctctctcatacgtactactcccctgtgaccatctttgggctagtctatacatctcttctttctgttcattgttcaaatgatcgaaaagacgaggaattgaataaatcatcctttccaaagagtcatccataaggtactctggtgatactccgaaatatgccgaaagctctaatattcgctctgcagatggttttttcacgtgattataattgcttaactcatttcttggataacctactaggtctctttcagcattatttaatgaagccccggacgaagctgcaagtgcttttatttttgctaataatagacattcagtcatacaatctcctcataatagaccgagcttaaggtaaagctagtgttctataaaatacaaatttattctttacatagtaaacaataattcatgagggaaagtaatatacaaaaaagcaaaaaaaatttcataaaatcaattttttgcttgtatagtcaacattattgtttctcacgtgattccaatgttgatgtactcatcttttctccttaaaaatcgttcaaactttatcgacttgacttcaactgattagcgtatcattattataatatactatctcaatattatctcaaaataaaaactaggtactacaacccagtttttttctgtttctttttcataatccagaatactatgccaccaattatctaattgagtttgcctccagttgattgttttgctttaaaatctttataaaaagcaatggtttcatctttttgcttgatttcgatttcatatttctcttttatagaatttttttctagttctgtttctttttctctgagttgtaattttgctttaagtggagctatactataaaagtagacacaaatatgtgtgttataatctgtctaggaagacagaaaaatgaaaggacttttatgtcaggatttaaacgttacgacgaggtggaccactatcaaataataagacataaaatgagctatattttttcaatatttgagtgttcagaaaatggtcattttatgaacacccttcttttcttattaagattattaaaatcatttgcatttattgttcattaagccgtaatttattctatgttcatttatataagtgctttcaagttatggtacaaacgaaaaaccagctcacaacttaacaattgtgtcgctttttttgtgccttataattaaaggtgttaaaatacgtcataacttaccaccataaagcagtccaattaatttattgacttctaagtaaaataccaggagttttgctatgaattaactatgatcctaggtggtcactaaaacattccttaatttaggggctataattaaataataacccctctaaaagactattaaaacagcccccattatctactagttagataatgggggctgtttttgttttaaatgttataatgaaccattaacaaactacaagaggttaggtatatacaatggcaataactgaggacagcttagcattaaatgatataaaaccgatttgatacaaataacgaaaggaagtagcacttatgaaataccaattagagtacgataaactagcacttactgaacctttttactatgaagaacgaggagaatggcttgattgtctgcagatttggttacgattctctccgatttttactgttcctaaaggcgatacaccaatagaggtaccattaaatttgaaagatggcacgaaaaaaatgctttctgatttagttagagttgcctttgatggtaaaaaatttacttttgagaacgttcaagatactttggttcaatatgaaattgttgcatacggtcgaggtctaacgaatgataataacattcatataactgatgccaaagaatttactgaaatagtaaaaaagtataaccaatatattgaaatagatactcggttacaaaacctagcatattcttggcatttattagattaatgctagtttgttatttcatcaagctaattgcatagatctcattaatggctataaactcgccaccaatcatcaatttatcctggtaatagccttctattttcccctcaataaaaggggccacataaccattttgatcttgcaggctgcgttcgactctaacaacctgactcttttccaaagcctgacttaaacagctttcaatctcgttaagcgccatttgttcactatgccggcgatttaatttaatttcgtcttcacgatctaccttattcaaactagccgtatgatcactcaagtaaaatccttgccacttcatcatgcctcggtcttgatattggtttaaaaactgtgttaccaggtttgggtcaaattcttgtttattcataggaattccctccagcgtggccaccaactaagccagcacgttgtacagcggttgcgccaacagatttacttgataacttaatcagtgatgtgaaaccatatttttttcgaatgtcatcaaccgtacgatcaagattgcgattttttaaagttttgtactttgtatcaaacaaattcaattgcacaacattatcgtcaactagaccagcacagctaattgagatgttccgaacggcttcgccttgccacttatcacgaaaaagcgttatagcataagctgctagaagtccgttatcattggtggcattaattttcatagagtggccaaaaccacgtttcctggtttcctcctttgctctgaaagaataaccgattcctaagctaataactgtagccgctttatgatgtgaccgaattcttgtagccacctgttcggcgatttcacgtaagacaatctctatttcttcttgcttggtataatcgcgtggtagcacctgactgtttccatacgatttagccttaggtacgtacttatcacgaattaacgcccgatcgataccccaactaaacgcatataattgcccgccaataaccccaaatttctgttttaaaagaaacgggttatagtgggccaagtcatacattgaattgatacctaacttatttaatttctcggctgtcttatggccaattgaccaaagatcatcaagttgtgtcactggccacagtttgtcctgaacgtcttcatagtgccattcaccaattagactgtgggtacgtttaccttccacagctcaaataaatcattaatcggatagttaaaaaacagcccaaaaccgccagtgttgatcgcaaggaagtcctgctttcagaaatcaaagatctactcgaaaatcagcaaaaatgaaaacagccggcttgctcaaattactttcaaaccccaattaattgcgattaccggatatttgaactagaattaacttataaatgattttcacaaatggaaatacttgagaagaggttttgttatgagaacgtttgcgataagggctcgtgatggggtcatggaaatcaattattcagagaattccaataagcccccttttaggaagtttatgatcacctacaaccccaaattttcaattggcgataatcttgagaacattaaggctgccctcactggggtgccaattgatgcagcaattattgaggattcattgaactatgaattctctgacacgatcatcggtattaatcatcaaaagatcgatattggcctagcaattgccaacatgatgaatattccggtcgttaacctgcataaggttcaagatgttggtttggaaaaagcagtggcagaaaaacaggaatatttgaagtggcaccttgattattatggtgagtacagcggcaagcgtaactatgggcaagaggccatgctgacaatcggtaacggctactttggcctgcggggtgcgtatgtcgaagcgaacgccaaccaggataattaccctgggatgtacgttgctggtgtctacaatcaactcacaaccaaaattaacggtcgggatgttgtcaacgaagatctagtaaacctccccaatgctcaatacatcagttttggggtggatcatcaacaaccgtttgaaattaaaaaagaagatattcaagatatttatcgaagcctaaatttgcgaaccggtgttttaacaaccaccttgcatattcaattatcaactggccacattttgcaagttcgggctaccaaagttgccaatatgacaaattggcatcgttattccatcaagtatgaattaaaaccaatcaacttttctgggagcattcaactctattcaaaaattgacgggactgttattaatggcaatgttgagcgctatcagggtttcgatcaacaccatatcgacgtcattggcatggttgcccgcgataaccagatttcgttaaccggtcaaaccaagacgtcccacgttaactttgtgattaattctaagctttctagcaaagatatcgataccaccaagttaatttcagctgaaactgaagataaatcaatccagcaaaaattggatatccaagtagaacctgagaaatcgtatgtatttgaaaaatgtgtcacagtatttaccagccaaactcaggatgccaacttggaacaacccgcccaaaaggaactgaacgcttcttcgttcaatgacaccctcgccgacagtcaaaagttctggagcaacgtttggcagaattcagatatccaaattgataatgatatgaccagccaaaaactgacgcgggttaacatctaccatatgcttgtgacaagtgccgccttggcttctggtcaattagattcctcagtcggcgctcgtggcttacacggtgaagcttatcgaggccacatcttctgggatgtcacctttgatctaccgttttatgctattcattacccagcaatcgctaaacagtgcttgttatatcgctataatcgaatcggtgaagcgcgcaaatacgccgcctcggaagacaagcaaggggcaatgtatccttggcagtcagggatgtatggggatgaacaatctcaatttgttcacttgaacccggttagtggtgaatgggatccggataacagtcgcttgcaacgtcacgtttcactgtcagttgcctacgatgtcattaattatgttcatctaacaggtgataccgaattcatgaggaactacggattagaaatgttattgtcaatttgcaagttctgggtcagcatggcaagctacgataaaaaagatgatcgttacgatattcatcacgtcatgggaccagatgaattccacgaagaatatccaaactctgatgatcacggactcactaataatgcttataccaatatcatggtttcttggttatttgataaagtcgcagagctgatgagtcatgaagatcctaagataatcaaatctgccaatgaaaaagcccaaacagacaatagtttacttgatcaaatgagtgatattgcccacaaacttcgtctcgatatcaacgaagaaggcatcattggtcaattttccggttacttcaatctttccaagctcaactttgattcttaccggaagaaatacggtgatatatcgcgaattgatcgactgttaaagggtgaaggtaattcacctgattcctatcaagttgccaaacaagccgacactttgatggcttattacgaattaccatttgatgaagttcaaaacgtcattacccggcttggttacaagttgcccgccaactactttaccaccaatttaagattttaccttgatcgaacgactcacggatccaccctttcacgaattgtttattcagttctggatgaaatggatggcaatatggatcgatcctggcaattgttctcaaccgccttgttctccgattactatgatatccaaggtgggaccactgctgaaggtattcaccttggcgtcatgggtgctacgcttgaaattgaaaccaagtgttacggcggggttcggtttgacaccgacgaggtttccatcaacccgcaccttccaaccacttggagtaagctatcatttaagcaaacgtatcaaggcatcacgtacaattttgaaatcggtcatcataaaatcaatgtgactgccgattcgagcagtcacatcaaggttggtgacaagggttattcattatccaagaacaagccaactgttattacttacaaataagattaggagtgaaatacaatggcaaagttttcagatattaaaggttttgtcttcgatctcgacggtgtaattacggatacttcggttttccacagccaagcttggcatcaagttgctgacaaggtgggtgccccatggtccaaagaacttgaagacggattaaagggaatcagccggatggattctcttgaaatgattttaaaagcaggtaatctacaagaccactatactgacgatcagaaggttgatcttgcaacggaaaaaaatacaaactacttgaagttggttgacaaaatgactccagctaatattcttccggggattaaagaattcctggatgaaattaaagatggtggttatctgttatcattagcttctgcatcaaaaaatgctcctactgttttgaagaagctacaattgactgattattttccaaagattgtggatccaaaaactttgagcaaaggcaaaccagatccagaaatttacctcaaaggtgccgaactgatcaatttgaaaccagaacaatgcattggagtcgaagatgctgccgctggagttgaatcaattaacgccgctggggaaacctccattggaattggtgacaagacaattttgaaggatgcagatgtgaactttactgataccagtgaaatgaccttggctaacattaaaaaacagatggactaattcaatccatttggaaaactgggacaattgatgctttaatcccatcatttaagggcttcaccctgaaatccaaaacgaggatttcagggtgaagcccttaaatgattgcgtatcgtaagttatttgattaacccgtaatgcttcagcccattcacaattccgccattcacatttgaagtagtgacgaatgatgctttggctttcacatctgggtgaccattacccattgcgactgggtaatccacttcagcaaacatttgcaaatcattcagctgatctccgaaagcataggacggaatgtcccctaattgcgctttcttcaagagtgcttgaatgccggtttgcttcgatatcccccacttcatcgtatctaaacagcgaggattatttctaaccaatgacaattcacccttgaattcatcctgatacagtttatctttatcataattaaaaacgttcaagaaattgacttcatgagtcttgtaaaagtccggctcaacgtgcggcgtcaatcttaacagccgatagttaactttagttaagtcattttcagctgttaaggcaaattcttcattgttatagaatgaaatcacatcgccctgctttttggcaaatgctaaaatctcttcaatcacctcatcactaatttgctcagcctttagctttttcccttgatattgaacgtaactaccgttcgcactgactaatgaattgataccggtagcgtcaatcacatattgaatttcaaaaatatttcgaccagttgaaattacagggagaatattgttctctcgtaactgattaattgctgcaatgttgtcatcagaaacattcttttgattatcaaatagtgtgccatctagatcaaaaaaaacaaccgctttatacattgaattccctccatttaactcgatatctacattgtactacttaatctactgctccctgaaaatttcgcctaacttttgacaaaaatatgtatattaatgcttttcttctttgcgatctaacctgaataaaatcgtcgcgccattgcggattgttccgtcgctctttataaaaagcatatgtatgtttggtccgagttcgcacgcttaaatattttttggtcattatttccacaagatagctttagcaatttcattcatactattaacttaataactataacaaactcttcattaaatacaaagattaatcggtattacacgcttctatatttgttgtacaattatctcattacgagtccaattgaggagcacccattcaatgcagtattttaaaaccctatttacaagtacattcacttttttaaagcagtcccaggcctattttcgtagtgtgttattgatgcatggctttttgcttttaatttgtctaccgcttttgagtaaagccagctacttcattctggtacataatcagatccagtttctcgcgttgagcaacttgccagcgcttattcatcagcatccgattgcgctgttagcactcgtaggaattgcgctactaattttattgctggctttcttcgaattcacgtttcttctattaagtgtgtactttattcagattaaacggccgctagctttgcaggcattgctgaagatgacttttgcgcaactcaggcaccttcgaattggcacgttctttttctttctatattattgtcttttaattttaccgctgggcgggcttggctatcattctgatttattgactaagtttaaaataccggcattcattctggattatattctcatgaatcggcgaattgtcgcgggacttttcattcttgtctatttgggcttattatatctcggcttacggctgatcttcaccctaccaaacatcattcttcagcagatgactttcaaaaaagcgttgaccagtagttggcagtttacacatcaaaaaattggctcattactggggcgtctactcttaatcggtgccgcactgattggctttacgggactcacttttttcctactcatccaactacaagcgttgattgaaacccacacatcagtgggactgccaagtgccgtggtcatcatgaccttgttgcaagctgctatgctcatcaacttggtgctttcaacagtcgccgtctttttcatcgtcattgattatttgttggccgacccacaatttgtgcaaccgacgttcaactatgcaaccttaaaattaagcgtgcagctcagtggtcgttggttattattcgtagcaaattgcgttttaatcggcgttgggacttataattgggactatctccattcagtaaccattcagcagccgctaagcatttcccaccgtggcgtttcgcaaaaagacggcgtccaaaattcgattagtgcgctgcgaaaaactacccgattaaagcccgattatgttgaaatggatgtgcaattgactaaagatcaccaattcgtcgtctttcacgacttccaacttgccccactcactgggcactcagggaccccgcagtctaaaacactggcgcaactgactaaaatgaccgtccatgaacatcggcaatccgcaccaattgcttcatttgatgactatcttgcacgcgccaatcagcttcatcaaaaactactgattgaaattaagacacccaccaccgataatcccggcttggtgcaacatttcctgaataagtatcaggccaatatcgaagctcacggtcacatagtgcaatccttaaactggcacatcgtcgaggccgttaaaaaggcagcaccgaagattcaaacgggctacattctcccctttaattttatcggcccaccaatttcgaacgctgatttttatgccgttgaaatgacaactgtcaacagtcacttcattcaagctgcacatcaggaaaataaggccgtctttgtctggacacccaatgatcaacaagccgtccaacgcatgatgtatttcggtacagacggcgtggtcaccgacaatctcaccgcggttaagcaagctaaacaacaaaataaccaacgacactacgccgataaactcgcatattatgtgatcggtattgggtaatatagtaaaaaaggattgggaatcgatatttttatcgattcccaatccttttttattagcgattctttctaagccaacgtcttacacttgaatagccaagcgtaagccccgttaagagcaatacaccagctgaatacacgaatccaatgacaatcaccgtcttcatcaagcctatttggcgaaccatgtcagcacaaaaagcagccatcaatcttcaattgacagctgcttgcactttatttgtctaaaagtcgttgtgctttttgggcggcgacgttcatgatgttccaaggacggtcaaaacctggttggaagaagaagtcagcgtatgctaaatcatcgattgtcatcttaccttgaatggcaagtgaaatggcgttgatgtttgccgtcacgtcagctttagacatgatttgcgcaccgagtacacgccgtgtttctggatcaaaggttaatttgaaatcgaccactggattttctgcttcagggacgaagtgtgggcgatatgtttcagaaaccaaaacagattgggtcttcacacccattttatcagccgttccttctttaatcccagttgaagcaaagtgataatcgaagacgctcaatgctgatgaacctgaaacagcgggtaccggttggttggcggtgactaagttcttagcagcatagcgaccttggcgacgcgcattcgttgctaaagcaattggcatttctttgccagttggtgcgtattttacaaccgttgcatccccgactgcaaaaatatcgggttggcttgtttgtaagaattcattgatttcaatccggccgctgcggtcgagttgtaatgtatcttttaaccagcctgtgttaggccgaatcccagcagcttcgatgactaagtcagcatcgtattcagcttgatcggtcacaactttagttagcttaccgtcaacgccgacatattctttgacgccttgaccaactgcaggatagatattgtgcgcttgcatttcagccgttaattgatctgtaaattcttgatcgagatagagacttaatagacgtggcaagacatcaacaactgtaacatgtttgccagctttagcaaatgcttcagccgcttcaatgccaatataaccagaaccgatcaccacaacatttttaacggttggatcaactgtcttcgcctttaatttaatcgcccaatcacggccacgcattgcgtagacattctctaaatcacggcctggcactggtaattcaaatggcacagcgccgacactcaagactaacttatcgtaactttcttcacgcgttgtattattctttaaatccttcacttggaccgtatgttgatcggcgttaatcgcggtgattgcttgttgtaggttgacttcaaccccttttgcccgcatgccttctggtgtcgcataactgacatcatcaacgtttttgacggtcccttctaaatagagttgcatcccgcaggataagaacgataggaaatcgccttgttcgtaccattggatggttgcatccggataatcgagtaaactttcttgaacagtttcaaatccaccatgagatgaaccgacaacgataattttcacattgatcactccttattctattttacacaactcaagtataacgcagatgatattaattacaaataaaaacgcattctcggctgactttcaactgaccattcttaaattccatgctagaatagtgacaagctttacaataaaaaaacaatggagattgctatggcctttaccaaacaaaacttccccacttttatctatctagcaacactttatctcacctatcagattctaaatactttgattcgcatctttaccagtacggatattctcgtctacgccaaagaatcattaactattttcatcgttttcttcggtattttctatttctcatatatattgttcggcgttggcttattatacgctggccacgtcatttcgaaacaatcgggcaactacgaaatttcactcataattttaaacatcctcaccacttttagtacccttaccacgattattttaaaattttctggggcgcagatgccgcgtttcttactttcaaccacttttttcatcattttgaccaccatctcattagccacaacttccaaactgctacaactgcgcaccaagcgaattgacaataagtgactgccaaaggtgaagtagcgtctttttatgttaaggaaacatttttcatgaacggtaaaattgattactaccaactctttcaaacaatgtatcggcaatatgggccgcaacactggtggccttctgattcccattgggaaacaatggttggcgcggttctagttcaaaatacaaactggcaaaatgttgaccgctcgctcgccaatctacgatcaagtacgcacttcgagccaaacaatctgctttctctttcggatgaagcccttatgttggctattaaacccagcggcttcaataacgctaaaagcaggacaattaaagggccatttcgatttttagcgacagttgattttgacttagacacgctcaatcagatgacaaccaccactgacctacggcgccagttacttgccatcaaaggcattggcccggaaacagccgatgtcattttattatatgtcttcgaccgcccagtctttatcgctgatttatatgcccgccgcttaattgctcacctagagcactgttctttaaaagacctccactatttaaaggtacaacaggttattgaaccacagctcttaccccaaatgactgttaaagactgccaagaatttcacgccctaattgacgatcatggtccaacctttcttgcagcacaaaaataagccggcatccgtttttagacggatgccggctttttaattatccaacaacccctttgcttgtatcagctgggtggaagagttggtcaataatacccgaaacgcgggttaaatcaacattcccgcctgaaactaaagccacaatatttttatctgttaaccattgaggatcaattttaccactcagcagtgctgccgttggtaatgcaccagcgccttctgtgacaatcttagtccgttgcatgagatccttcatcgcagttgcgatttctttttcggaaactaaaatcatttcatcgactagattttgaaccactgggaaagtcagttcacctggaatcgcaacgtctgtcccatcggctagcgtgaagtccgcatgatggctggtgattgtgcctgcttcaaatgaagccgtcatcccgtgcacgttttccgattgaaccccaatgatgtgaattgaggggttaaaggatttcaaagccgtcgcaatgccggagattaagccaccaccgccaaccggtacaatcaccgtatcaacattccaaatcgcatccaaaatctcaaggccgattgtcccttggccggccatgacttcgcgatcgtcgtaggggtggacaattgttaagcccttttcggctgctaactgctccatgtacaaccgcgaatcattaaaagtcgtaccatgtaaaacaacgttcgccccataaccggcggtcgcttgttgcttagcaagcggtgcttcttctggcatcacaacggtcgcatcaatccctaataacttcgcggtcaatgcaaccccttgcgcatgattgccggctgaagctgtaatgatgcctttagcccgttgctctggcgttaaatggttaattttattgttcgcaccacggaatttaaacgatcccgtcagctgcatattttccaatttcaaatagacatgaccgtgcgccacattacgactcaagaacattgattgaattaaaggtgtttcgcgaatatacggtttaatggttgcccgtgcttcctcaatatcccggatatcgcaaatgtctgcggtttttaatactaattgattcgttgccattctggccacctcttccatttgaattgacacaaatgtctgcggataggttgtgctatccttcacaattaaatgtaagccacttatcaagcattgtcaaaacaaaacggccttaaattagaacgctttcatttggtggttattaagttctcattctagttgtttaaccagcaagattgactaaagataatttatacgtacatggatggcatgcgacagactatgcaattggcaaaccctatagttatatcttggtcttagatgcccttaataatcgtgaattagcacgatttagttttaatcgtcaaacaagactggatgttttaaacgcttatccggatgtattcaatgctcaagaaagtggttttaacttaaatatcccaattagtagtaatatgaagggaaaaatcgtcagaattgtaagtcgttattcagatgcacctaatggtaatgggaatacgagtgattatttctttactagaaattctgttacaattaaataatttaactcagagaaagccttatcgagatgattacatatatcggtaaggctttccaatatctacagaagaatttatacaaagtaagctggcaagtaagtattgaataattgctagtattttttgataattaaagcattaatttgtattttgtattatacttttaaaagttgtaatttgtatttagaatagagaacgaattaaatgtttaggggttgttttaatggacagtatcaagaaacggtttaaagaaaatacttatttaggatttttaatccttttggtaagtttattcatagttaatcttttttttggcataagagtagatactgatgataattggtttaaaggagtgcatacagtatatccagatatctttaaatttttaaaatggcggtatgactcatattctgcaagaattattccggacggaattgactattttatttttaacgtaccaattataatctggcaagttataaatagtctatttatattcttgggggggtatcttttagcaacgctttttaataagcggattacggtcaagtcagtttgggttgcaattgcaagtttatgtttagcagatttttcattaatctgggatagtgcttactgggtaaccggttcattgaattatttatggccatcagttgcagcattatttattttaaaaccatattttatgcgttatcaaggacaagagcaaaatgaaaaatggtggtatcaactgtcaatgataattgcaactatttatgttggattatcaaatgaacaaattttagcgttattgcttgggtttattttgcttttcgaaggatataatctgattaaaaatcattgtattaaattaatttctattccaattaccattatcttatttgccattattgtttttttattaaaatcaccgggagtagttgcgagacaggtgcatgaggtaagcttttggacaccagagtttaataaatactcaactaatttgaaaatccgtatatggtatgtatgggcgattagaaatattgcaaaactttattattttgttccctttcttttaactgggttgatgtatgttgttttaaatcagaaaaaagagcaaaaattattcttcactattcagctttggttgctaccgataacaatgttgagctcattgagtattgatttcaatagaatctttatttacttataccagccagtaacggtggcgcttgctaatcacgacttttggattgctattttgccttatattctttggtcatttgagttattagtgttgtcagcaggcattgtttggtcaaaacataataaattaatggtacttttctttctgttatctattgtggctgggttagctatcgttggtaattcaccagcaattttttcaactgttaaaatttacagaggtgccagaattttcttttttattgatttctacattgcaattttcgctttagatcttcttaaaaatgtagagaattcaaagatattgaaggtgctatactcggtagcaataggcggtgtactgcttggtgttgttatgtactaaaaacagctaataaaaaagtcatagtaatgtaatcttttttaagccgattaagtgtattattaataaataaagtctaaatttaattaagggagaatttaacaatgctctttcgaaaaatcgcaccaattgttttactcggaggttttattctagctagctattcagttaatcaggtacaggctgccacgagtgccgacactagttctaatagccagtcagttgcactggctgattctagtgatatgctaagtagcagtagcagtagcagtagcagtagcagtagcagtagcagtagcagtagcagtagcagtagcagtagcagtagcagtagcagtagcagtagcagtagtaaagaagctaagacagctaaagaagaaactaaatcagatgaagctaccgtatacgccgatagtacattaggacccggctactatggcactacaagacaagcaactcaatctttttcaccaatgttacggagtaagttacggagtaatttattggtgcgcggaaattatgtagatgatttcttaaatcaaattaaacaaggaaccataaatacgtggacaacgcaccgagtgctaccttccatttccgctgcacaagcgattttagaaagtgcatggggacaatccacattagcgacttcagcgcataatctttttggaattaagggcgattataatggtcagtatgtcattatgaaaacacaagaatacattaatgggcaatatatctatattgatgcacctttcagaaagtatccagatgttgcaagtagtattgcagatcacggaacttttttgaatgttaattcaagatatagcaatttattgggcgtgacagactataaaactgttgcacaattgctacaagccgatgggtatgcaacagctccaacgtatgcagaatctctaattcgaattattgaacaatatcatctctatgattgggataaagaatcgtttaatcaaggaaaatatggttctttagatagatttgacacactcaatggtcaattcaacgcttttgggtggtcaattgattctgattcagccgggaaaccgtatagttacgtctttgccttagatgcaaaaaacaataatgaaattgcacggtggccaatttcaagatggaatcgcccagacgttggtaatgcttatccaacaatttctggatcaagtaacagtgggtttggtatttttgcagatatgccggcttcattatttggtaaacaagttaaattaatggttcgttactcttcagatgctagaggtaattatggatcagtcgattataactttgataatgtattgaatatacctacgcaagggacacttggttcattagatgttttaagacaacaagggaactcggtctacgcatttggatggcatattgggcgatatatacaatcaacgccatatcgttttatgtttattatggatgctaagacacacactgagattgaacgaacgagaattgataattttacaagaaatgatgttgctaaagcttatccagatttttctaatggtaatttaggtggatttaacgtaagtatgccaattactgataaaatgcgtggtaagactgtctatacgattgttcgttacacagatgatttccgaggcaatggaaatacaattgattacagctcgccaacacaaataaccattaaataataaactaaacgcagagttgatcaagaatgatttgatggatgatgcgttttttagtatgaaaaaattttataaaatgattgttaattttttattaactcggatttaaataccctaagtatggctgtttgtggtatgcttattggtgtttatgcatacaaaaaagtggtgaggtttgattaatatgaataagaaatacagtgtagatgaagctttaaccgaaatgatgactatcaagaaccttttaatcatcattgcgactacaatttgctttgcagtacttggactatttttaaggggtaaaggaacaacaacaacgtcatataatgcgatttctaagctacaggtaacacaatatgatgcaaatgataaagtaatgacgtttagtagtaatgatccagcttttctgaatacatatttagaaaacttgaagaataataagactcaaaaagcggtcaagcaagaattagcaaataaaaagcttaaattctcggtggataaaattgattcaatggttagttttgaagtaattccacaaacgactctgttgaagctgaaagtatcaggggacactaaaaaaaacgttaaactggttagtcaagcatatgacaaagtagcgttagaacaatataaaaaagatatggaaacggggtctgttaaagttgttgatttcgatcaatcaacaagtactacaacccaacgaatgagtgctaagaaagcagtcttttttgcgagtgtcttgggcttattcttatcagctggtttaatctttgttcgtaaatattttaatcaaaaaattatgagcagcaatttcattgaaagtcggacagcgacaaatgtaattgcagatgccagtgacttggaaaacgctgctacagaactaataacgcgtataaaggatacacatcaagttgtcggggttaatgctaacgatacacaacaaattgcactaatcaccgatattgccaatcagttaaaggaatggcaatttaatgttaagttagttgatgcaaaagaagcattcttaaaagatgctatgatgattccagaaaatgaagatcaattaatttttgtcattggcgatgtacaaaaacctactgaaaaattagcattgagtagcgttgatgcaatgttagcagttgtgcagactaaagtgacaacaaaggacgaattattaaacctaattaaattcactaaagatgcaacaattccttttattggcagcttgtatctaaaataaatcgtcttggaggaattgatggtgactaaaaagatagcaatcttactatcaacgtataatggggagcgttttttagaagaacaaattgaatcgattattaagcaatccaaccaacagtggacactctatattagagatgatggttcaactgacaaaacacttgatatattaggtcgttaccaagcagatgaccgtattcaatggattaatgaaaataagccacaaaacttacgggtaatcggctcatttttgaaattacttgaatctgtagaagcagattattatatgttctgtgatcaggatgatgtttggttatctgataaggtccaggttaccttaaacaaaatgctcacacttgaagctgaaaataaacaacaacctattttagttcatactgatttaagaattgttgatcaagacttgaaggcgacgagcgaatcaatgattaaaacgcaaaatttggatccacaacctagttttgggcgattgttggttcaaaatagcattactggttgtacaatgatgattaatcagaatttaaaggatcgttgtgtgggactagatttcactaagattagaatgcatgattggtggtttgcactagttgcaagtgcatttggaacgattggatacgtaccacaagcaacaattctatatcgacaacatggtgataatgaagttggtgctaagaacagcctaagtgaattgatgagccgtaaacacctatttgcacaaacgaagcagatgattcaacttgcgatggcacaagctactgagtttgttgctgattatcctaatttgacagacgacaaagttgaaatggttcatttttacacgaatgttaaaaactattctaaagttgaacgttatcgtaaaatgagaacatatggcttattaaaaaatggctctgggcgtaatgcgttttatgtttttcagatgttaacttggtaagttacaaatattgaagggggattttatccaatgaaaggtattattctagcaggcggttctgggacacggaagaattcagtttcttagaatcttttattttggctgttgaaatattattatttatgatactttcgcgatttctgggttgttccttctcaacatgcgttatactattagtcagttactattttgatcaattgaagtaagaggaattttaaatgcaaaaaaaactagttatcacggaaaaaccaagtgttgccaaagagcttgctaaagttctaggaacaactcagaaaactaaaacctactttgagggcgatcaatacgtcatcacttgggcgtttgggcatttgttatcgctgcaattaccagaggatatcaaaaaagaatggcaacaatggcgtttggaagacttaccgattattcccaagcatatcggtttaaagccattgcctaaaacgggtggacaattaaaagctatcagtcacctcgccaaccgcaaagatatttcaggtgcggtgattgcaactgattcggggcgtgaaggggaagccgttgcgcgctatattttggaatggattaaattcgataagccggttgaacggctctggatttcatcgcaaacgactaaggccattaaagcagggtttgcaaacttaaaaccagccaagcaattcgataatttgtacgcatcagcgttagcacgcggcaaagcggattggttgattggcttgaacgtgacacgggcattgacgaccaagtatgaagataatttatccgctggtcgggtgcagacaccaacgttagcctttgtgaacgaaacggcacaacaaatcaatcgtttcaaaccgcaaacctattacacaattcacttgacggtcgatcaacagcaagccgccttacaattagcaaacccgcaaagtattaagacgcgccaagcagcagacgacttagttgcacaattgcaacaagccaaaggccaagtggtcagcgtcaaaacaacgcagaaatcgcaatcagcacctttaccatatgatttaacggaactccaacaagtggccaatgcaaagtatggcttatccgcgaaaaagacgttatccttgattcaatcattgtatgaaatccataaagttgtcagttatccacggacggattcgaaatatctctcaacagatatcgaagggactttgaaggaacggttgtcggcattagtcaaatttgatccacgtgctaagcaatacttggggcaaggcagtcaggtcaaacaaaaagccgtctttaatgatggcaaagtaacggatcactacgctttaattccaactgaagaacccgttcgtgccgaaaaattatcgacggatgaactgcgcatgtatcgcttgattgtggaacgcttcttagggttgtttgctgatccatacgtgacagctgttacgaaagccaccgttaaatttggtgatcaaacctttacgtttaagcaaacaaaagtcgtgcaacaaggttggcatgctgccgataaagaggggcaaccaaccgcgacggtcgactggcgagaagggatggtagttcgcgctaattttgcggttaaagaacaattgacgacgccccctaagccattgactgaagggatgttgctcgggaagatggaacactacggtttggggacgccagccactcgtgctgaaatcatcgaaaaattagtccgtagtgaactcctagaacgacaaggtcatgctttagcagtgacgccaaaaggtcagcaacttttaaaattggttaatcagaccttggtttcaccagaactgacaggaaaatgggaacagtcgcttgaagcgattgccaaaggcgaagaaaatccgaaggcgttcatcactgaaatcgagggtgccactaagaccttggtcggtgagattaaaaagagtgagacggaataccgcgattttgcagtgacgaataaaaaatgtccggaatgtgatcatccgttaaaagaacgcaatatgcgtgacggtaaaatttatatctgcacaaactgtcactatcggcgtcggaaagatccgaaggtttccaaccaccgctgcccacaatgtcacaagaaaatggtgattattgaagggcaaggtggcgcatacttccggtgtcttaatgatgggacgaccgaaaagatgctcgacaagaaagatcgtaagaagaaaatctctaaacatgaagaacgccgcttgattcaaaaagtgaaccaagaagatgaaccagcggaaagtccattagccgctgcattgcgtaaggcaatggaaaaataagctagcaaaagaggtagcaactagaattattctggttgctacctcttttttttgtttagaaaaattgtttgacttgttgtttggtgcggtcaacaatattctgaccgtctttgacttgcatgctagcatctaagtgagaacgaccagtcatgtaatcgaatgcgacgccaggttcaacattccagacgtaatcgttgaaattcagcgtgccatctgtggaaatggcctgaacccagtaaccgcgcggcatcagttcattaccccgaaaaacggtggtgactttgtaaatcacttttttgtttgcttcgagcgcagtgcggactttttcttcaaaaatctgcatcgttttctgattactgtacgcgctttgggtggcgaggttaagtggattatctaaactgcctggttgaccagcttgaaagttaccattctgatcaaaattaaaagtgagtgtataagcaatcaagtggccacgattttgcggtgtaattcggcggccattgacaatcagaggttgattatgccaacccgttggattccaaatttggcgcgtccggccttctgatttgcccagattccgctttgataagtaagctgtgacgctagttgttcggttaagctggtcgagttgcccatagacgattttttcaccttgccaatccgttgctgttaattggctttgatcgttattaattggtagataggccgcagatccgcttttaaaatcttgatcagcgatggcttgataatcaggactgactgggggtgtttgtttagctggttgctcagtagcaactgtagcagggaacacattttgtaagacattgttgcgaccaccgagataaccgactgccaagatagcaatggttaagatggttcgtctaatttttttcgttttcaaaagagatactcctattaatgaaaattgatttgagacaagataaaaacccacgagatgaattgatcatcggtgggctgaaggtattattttgaactattgcgtagtgtcagcgtcgtgccaatcgtaatgacttgggggataatttcgctagcggcgagttgtttaaccaataactcggcagctgattggcccatttgttcagtgtaaactttaacggaacttaaagtagggaacgtgtattggcaaattgaggtatcgttgaaactaatcaggctgagttgttcagggactttgatgcctgattcatgtaaggcgcgtaaagcgccgactgccattgcatcattggcgatgaagagggcttctggtaaatcggaactttggtcttgtaataattgtatcatgagttggtaacctgattcgggtgtaaagtcaccggttaaaatccaatcggggtgatagtttttttgagctttgagtaacgtcttaaaatgaataaaacggggatccggtcccaatttagtattatcagcagtgctctcttgaccagttaacataccaattttagttaagccagcggttgtaaaatggttgattacggatttaattggtgttttgaagtcggtcatcacacagctgacttcacaatcgagcgtgttcatgtcgacgaagacgaggttgtggttgagtttttttaggcgcttaatctgcgcagggctgtacttaccaattaccacagcacccgtagcatcatggagcgtatcaaatggatcgttttgaaagaagcgtgttacgtcataaccaagttctttgagtttcttttcaacgccaagtcggatggagaggtagtatagatcttccaattcttctttagcggtataccattcaacaatcgcaatgcgtccgcgttgctggttcattttgcgcgtgtttttacgatagtttaaactttcggcggcttcgaaaatccgttgccgggtctcatcgccaaccgaaagtgtttgatcataatttaggacccgcgaaacggttgcattcgaaacgttagcgagttgagcaatatctttgatcgttgccaaggtgcacctctcaattcaatgtttactattacttagtttagcataaccaatgaaaagaaagcgatagttaacaaaaaagattgattttttagtaaatgtttagtaaaatgaaagcgattaataaaggaggaatttactatgaacatgacagaattaaataccgcattcgaaaacgcattccacaaagcaccggaagcgagctacttcgcaccaggtcggattaacttgattggtgaacatactgattacaacggcgggcatgttttcccaaccgcgattacattgggcacatatgcagtcgttgctaaacgtgatgaccaaacaatcaatttattatctgggaactttgaagatgcgggtgtcatttcatttgacctcagcgacttatcttatcaaaaggcccacaactgggcgaactatccaaaagggatgattgtttaccttcaagaacaaggttacacaatcgacagtggtttggacatttatttaaaaggcaatattccaaacggcgctggcttatcatcatccgcatcaattgaattattaatgggtgtgattctagaagaccaattcaatttagaaattgaccgtgtcgaccttgttaaaaccggtgtcatggttgaaaataaatttatcggcgttaactcaggcatcatggatcaatttgccgttggaatgggcaaagccaaccatgccatcttactagacacgaacacattggattacgatttagtcccaattgatttgcaagacaacgtgattattatcatgaacactaataaacgccgtgaattggccgattcaaaatataatgaacgtcgcagtgaatgtgaaaaggccttagccattttacaaacgaagaatgatattcaatcattgggcgatttagataacgaaacctttgatttacaaacatacatgctacaagatgaaaacttgttgaaacgtgcacgccatgcggtttctgaaaaccaacggacaatgaaggcccgcgaagccctgaagaacaacgaccttgaacgtttcggcaaattagttaatgcgtcacacgtgtcattgcaatttgattatgaagtgactgggatcgaattagacacactcgttcaaaccgcttggcaacaaccaggggtcttaggcgctcggatgactggtgcgggctttgggggttgtgcgattgcaattgttgctaaagaccaagtcgacaactttgaaacgaatgttgctaaagtttatacagacaagattgggtatgcgccaagtttctacgtggcagaaattgccgatggcgctaaaaaattaggttaatcagtcaactgaagaggagaatgataagtcatcaaaactcctttttaagtccgtatgctaaattgtttgtaagctcaacaactaaatcaattattctttaacgtctgtaattgagaaaaaggcaaatcaaaaattcctattttaaaaagaatggcacaatcgaataacttgtatgcaaatattcaattgcctataattagatttagaaggatgcaatttagataatggaggatttcatatgaaaagatttggactttggtcaaaaatatcaattatcatttctatatctcaacttttattagccatttttaaagaaattcaaaactataacaaatctaaaaaacatccttcgaaaaataagagaggatgaggttttatgcattggttatgggttttaattattggtgccatcattggtgctattgctggagcaattactagcaaaggaaaatcaatggggtggattgctaatattgttgccggattagttggttcctctattggagaagctatactcggatcttggggccctcaattagccggaatggcaattattccttcaattattggagcagtaattgttgttgctgtagtttctttctttgtcggtaaatcaaagaattagtttttaagcttcatttaaggttcttatactaaattatagatgctaacttagttagcacccctcgactttgttgtgagcggagccaattaataatattcctgacccacttagttttaaactaagtgggctttttttgttccttaaataccctatcaagttcaccagacagcagattcccatcttcatcacaggctaccagctggcaacgacaccttggatgagtatccgtgactggaatcggtgcttgtccataggcaaatgtttgtctatcaagtggttcacaaatatcacaaacacgatcatcttcctcggttaaccacatcacatactgaacattctgttcatcatacgctctattcttaccaccgttgctattgcgtatagcttcattagttgttaacgtatgaattctggatagcatttggttcataggcgttgttaaattgtcatcaattcgatcaccgctttgaggaatactgcgggtcattttattgatgtctgatttcttcatgcggcgactcaaacccttgttcagggtttctttcattcgtgtcgtcatgacgtcgccatgcacccaaattcgttgagaatactcagcttggttggctactttatctggaactgttgatagtttattagggcttgaattattatagccatcgatatactgctgtttgagttcattcaatgcaaatgattcactttttgctgtagcaatattcataccggcgccaatcattgcacccaacatatcacgccgagaaatagatgcttgggcaaagattgcttgcaagcgtttagacaatttatcactaggactagcgttagctagcatttcatcaatctaccttttaagtaaagaaaatagggaccctttcagttaacatgtgctaaccaaaagggcgccctattttcttttaataccgtatttcacacggtatcgaataaaggtcgtccgtttaatacctgtatttcgggacacatcaatgtcactcatgccagctcgataaagcttaaaagcatgttgcaaacggggatcatcttgggtgtattggggtttgcgcccatgatatttaccctgctgcttagctaaggcaatcccttgttgctggcgctcaatgattcgcttacgttcactttcggcctgatacttatagagttcaataatcaagttggtcatcagttgacgtaaatttgggtcagcaatccctgtcatggacggcaaatttaacacatctagggtggcacccttattttgaatggagttcatgatcttagtcaaatcatggttgtttctgcctaagcgatctaattcagtgaccattacaatatcaccctcacgaatataggccagcattttttgcagttctggccgattagtgttagccccacttaatttatccgtaaataatttatcaacgtcttttaaagccgataactgtcgatctaaatgttgctccttggaactcacacgcgcataaccgattttagccatttccaattctccttttggacagttctaatgaacacttgtaattcctagtatagcacagaaataaaaacggccactagggtataccctagtggtcgcttttgatccattatcaatggctttttaaattagggcctagtacttttggaatggaaatactttccaacaccaaaaattctagacccgattatttttgttaaacgagatttctatatataatggaattataaatttactgttggaggtttttatgactgatttatttgcagatgggactatctctatccatggagctcaagaaaataacttaaaggatgtcagtttagatattcctaagcataaaacgactgtatttgctggtctttctgggtctggtaaatcctctttagtttttgatacattagccgctgtttcccgacgtgaattgaatgaaacttttcctagtttcacccaacaatatttgcctaaatacggtcaacctgaagtgaaccgaatcgacaacttaccagtggcaattgtggttgaacagaagtctattggtcgtaattctcgatctactctggcaacctacaccggcatctattccgtcttacgtttgatgttttctcgaattggacagccttgggttgggtattctgaatggttttcctttaacctacctcagggaatgtgtccaaaatgtcagggattaggctttgttgacgacatagatgaacgtcaattaattgatcctaataaatcactcaatgaaggtgcaatgacttttgccggttttcaaccgggaacttggcgttggaaggaatatggcaacagtggattatttgatttagacaaaaaaattaaagactacaccgatgaagaatatgatttattcatgcacgctccgcaacaaaaattaaaaaatccaccggcaaattggggccgtacggcattatatgaaggactagttccacgtatgcttcgctctgttattcatagtgcctcaggtcgtcatcatgaagctgccttatcaaagattgtcactcgaaaaccttgcccagtatgtcatggaacacgtctgaacaaaaaggctctaactggtaaaattgctggcaaaaatattgcagaagtcagcgatatggatttagtaagtgtcctaaaatttttggataatatctcggaccccaaggctaaaacaatggtgcgtgaactacatagtaaagttcaagctttggtcgacatcggtttaggttatctttcccttggccgtggaactgatactctatctggtggagaagctcaacgaattaaaattgccaaatatttgacgagttccctatccgatttagtttacgtactcgatgaaccaagtgtaggactccatcctcacgatattaaattaattacccaatccttaaaaaagctcaaggaacatggcaataccattatcctagttgatcacaaccctgccattatttcgacagcagattatgtcgtggaaatgggaccacaagccggcaaaaatggtggtcaagtaactttcactggtacctacgacgaactattacggtcagatacgattacgggtaaaatgttacgagaaaaaatcactttcccaaagcctcgtgaacctcaatcttggctaaatgttaatcatgtaacttctcataatttaaaagacgtatctaccagaatccctcaaggtgtaatgaccgtgatatctggaccagcaggttctggaaaaagtactttagtccaagctttcaaacaacaagtttctgatcaagactatattgatttgagtcaggattctgtaggtttgaatattcgttctacacctgcaacttacttgaacattttaaatcctctacgaaagcttttcagtaaagccaacaatggcgtttcaacacaactatttagttataacggtaaaggtgcttgtccccgttgcaaaggtaaaggtgtgatgatcaccgagatggcattcatggatccaatcgttcaagaatgtgagttgtgtcatgggaaacgttatagccaagaagcactacaatacacttatcatggcaaagatatttctgaggttctaaatctttctatcaacgacactttagagtttttcaaagatgtgccagatatctacaaaaaggttagtctactccaccaagttggacttggttatttgaatcttagccagtcgatgaccactttatctggtggtgaagtgcaacgtgttaagttagcaatggaattgaatcataccggccgaatctatttcttagatgaaccaacaaccggattgcacttacaggatactcaacaattgatcgatttatttgaaggattggttgataagggcaatacattaattctgattgaacataatctgaaattaatttcacgagccgattggttagtcgatatgggacccgatgctggtaaattcggcggtcaagtttgttttgaaggtcatccaaaagatagcctaaacgataaaaactctcggactggtgctgcattagcagctataatttcttaaaagattcaaaaagatcacctcatttaaagtgcaacacagtggttcagttcccggcttagccgttcattttgaacgtaaaactgaccatcacaccaacaaagaaattgatgtgtcgaaaacttatctgaatcaagatctgatgacagatggttctgatatgctttcacgcttcaatgagcgtttaaatgacgtttattgcatgaaaagagacgatgtgaaggcgttagcgacttggattgtcactttacctgaagaactctcagaagcgccccacgatcaacagagcgccttttttgaagcaaccagcaattttctcaatgaccgttatggtcaagaaaatgccgtggccgctgtcgtgcattatgacgagacaacccctcacttgcactatgcctttgtccccgttgtttttgatgataaaaaatcacgctataaagtatccgctaaagaagtgctcacgcgccatgatttgcaaagctttcatgaggatctagatcaggatttaaaaaaggtgctgcccttttatgaacaaggcattttaaatcacaaaaccttaccgtttgagaatgtcgctgaaatcaaaaaatacaatgatcagtttaacgacctaaaaaccgaactagctgacgttgaagaaaatattagggctacgggtttttctgtccactaatatgttcaacttaaattttacaatctaccatatataaattagttatttttaaatattactatataaaaaataaaaatatcggagtgaaaaaaatgaattttcctattgattttgttgttgactgggtagatgattctgatcctaaatgggtatcgagtagggatcaataccgaaaagtatcacctgaaaaaaatggacggtttcgagactgggagcttttaccattttggtttagagcagttgaaaaaaatgcaccatgggtaaataaaatctatttagttacagataaccaaagaccggaatggttaaatttagataatcctaagttgcaattaatatctcatcaggactatataccagataaatatcttcctgtttttaacagtaattccattgaacttccaataaatagaattccgcatttatctgagcattttgttttttttaatgatgatttttttattaatagtccagttactcaaaatgatttcttttcaaccaaaggtttaccgaaagattctgcagtattgtctccacagattccaaaagacacatcgataactagtattaccactaataatgtaaaaatagtaaataattatttttcgagaaaagatatattacatcaatggaataaatttctcagatatgaatatggtcgtcagaatataaagaccttggcttgcttaatttggccaataattttaggatttcaagattcccacctacctatctcttttttgaaatctacatttaatagcgtttggaaattagaagagttgaggttaaatacgacgcttcagcataggtttagatcagataatgattataatatatttttatttaggtattttcaattattaaaaggggactttagtcctcgctctgttagttttggtaaatactataatttatctgataataatgaggaacctatcaatgatattaataaggggcttcataaagcaatagtactgaatgatcaagatgatatcgcagattttgaaaaagcgaagtcagaaattaaagagacttttatgaagaaataccctcataaatcaagctttgaaaaataattttaacattaaaaatggaggtatggcatgaagcagattgccgttctaatttcaacgtataatggtgaaaaatatatcgaagaccaaattaacagtatattaaatcagagatttgacagtgaaagatataacttaaaagttatcgtcagagatgatggttcaacggacaatactaatatggttcttcaaaaaattatgattgaacataaaaatgtgaaaaaacttccgtttgaaaaaaatctaggttttgctaaatcgtttatgactttgctgtcagaagttgagtctgattattattttttttctgatcaagatgatatttgggaaccaacaaaaatcgatgattttttaactgttatgatagataaagaaaaatcagaatctatttgcggggttttttcagatgcctggatcgctgatcagtttgcggtcagtacaggaattaaacttttagaagagagaaagcgcaacatactagatgggcagttaacatttatacagcaaatttttgaaacttatgtcgccggagcatcgttgtttatcaataataatgctagaaacaaggttttagagtttgattacgatagattttttagtcacgaagcacacgatcattttgttgcgataattattagtaaatatgggacattatatttcttggataaacctactttaagatatcgacaaactggaaataacgtctacggggcaagagactctaaaaaaaagtcagtattcaagcgtattattacattatatagtcgagtaaaaaacgtacagcttctaatgaaatcgggagcattgattattagtaacctacctgctgaacgagatttatcagaaacaatgttgaacatatcgagagggaaagcatcagttaatactcggattaattttttctggaagtatagaatgtacgtttctgtaagatatcctagaatattagcaacatgctataccttgtttacatttagaggtgtcaattaaatggcaagagaatttccataatgaaaaataatatattagaaaacttaatgatgtatatttattctgctcattctgctacggataaaccgttctccattttttgtaccttattaaacagcaataattttagcgtaagggttaatctagtataaatacttgcaagaaattttttagataacaaagaatgcattttttaggaacagtaaatgaattttttccgtaaagtattattggtgtttaaagataaggaggaattattattatatctagaagaaaggcatctgttagaaatgcttcgactgctcttttaacacagattattaatttattaggtaaatttgttgttcaaacaatttttattcataccttaggaactgaatatcttggagctaatggactgtttactaacttaataatgtttctttcctttgctgaattaggaattggtgcagcacttagctactcattttataaaccaattgctaatgcagatcataaggctataacggcaatcactaacttatatcgtaagatatataatactattggatggctaattttaatattaggcctactcttagcatactttgttccatttttagtaaaaaatagtggatccattaaacatttacgtatttattttattttgtttttactaagctcagtagtaagttattttttcacttataatcgatctctaatagttgcaaatcaagaaagttatatagactcgattaatcaattaatatttacaattatgaaatgtgttttgcagatagtgtttttaattactttaaagagctatatgctatttttagtagcgcaaattgcaactaatctattttctaattttgcaattacgagattagcacataaaaaatatccatttttattagatgataaaaaaataatgcctggtaagagtgttataactgagataaaaaagaatgttattgggactatttcttcaaaagtgggtgcggttgttgtaaatggaactgataatattttaatatcaaaatttgttggattatcagttgttggactatattctaactattcattagtagtagccggaataacatctcttttaggacaagttttaaattcagttgttgcgagttttgggaatttaggagtttctgaaaaggataatattgataaacaagtcaatttatttaatcaatttgttttttttaatggatttatttcaattgtagttggattattattgtatattctattccagccgtttatttctatgtggataggaacacaatataaattatccgagtttacacttattataattattattaattttgtttttgctcaattcagaccagctttatttcttgtaaatgcctatggtcttttttggggatacagatataaatcaattgttgaagcaactgtaaatttctttttgagcttttatttagtaaagtatatagggttaggtattaatggagtactaatagggactattgtgggaaatataattgtaaattcttggtgggatccgatgatactttttacaggtgcttttcatagaggtatatttaaattttatttacaatatatttattatattttcgtatttttaggtatgctgttatgtgagtttatgtttgtacactatattaaaattaatgtaaataatcttattggattaattctatatggtttatctagttcgattataatttgtattatattacttggacttctaggacttactccaggcggaagatctgcattaagtatgattttgtataagattaaaaaaattaagtaaggaaggttatttttatgaaaggtattattctagcaggcggttctgggacacgtagccgaaaggttcaaccttttttgtagtaattaaataataagttgggagaaatcagcatgattcaaaccgtaacagaacagaacatcgcaagctttgttcaaacacaaccgttagtgattttagacttttgggcggattggtgtgcaccttgtcggattatgacaccgatgattactgaactacatgaacaattagctgatcagtttggcttaggaaccgttgatgtagaggatcaagcagcgttagctgaacaatatgcgattcaatccgttccaaccctattaatcttcaaaaatggtcaggcgacagaaaaggtaactggcgcttttccaaaagagaagttaaaaagatacttagataagaaaatcgctgaaatgtaatcagcgcattaatagtagcccgcaactttcattggagagttgcgggtcttttttgataagtagaaataaaataacccccttagctattgtctaagggggagatgattattgacgaaccatgtggataacacgttgataaaggattaatgcgccaatctcacaaagtaaaatcaaaacagctaatggaagataggtataactgcccatcacgccaactaatggggaaagaaaaatgccgaaaacatacataccaagtccaagcactgaagaagcaatccctgcatgttgtccttggcgttgtaaggccagtgaggtgacaacggcattaattagaccaagtgttgcgaccactaggaataaaccaattaaagctaaccagagacgattagagccaaagccactaattaagacgcagatggcaccgattaaaccaccaattaagccgatttttaattgttgtaattcatcaaaccaatggattaaaatggtggacatttcagccattaagataatcccaatcccattgattccgtagattagactgaaagttgatttagaaagactaaagacattttgaagcatgaaactggaacctgaaatataacagaacattgccccataaacgaggccttgaattaaaacaaataggatgaatgggcgatctttaaaaatggcttgaataccaaggcgcgattgttgtgccgattgcgcgcttgtggatactgtgtgtgtttctttgaatcccaaaatgatgcctaacaatagaagaaggccaacaatccctaaaaagccgaaaataccttcccaagaggtgaaacggagcaaagcacttcctattaatggtgaaatgatggggaagataccgttgattgccatgagtaaggcaatgaattttgtcaattgtttaccgtcaaataaatctttagcgactgctcgagtaatgacctgtcctgcagagctcgctaacccttgaataaaccgtaaaaggaagaatagccaaatattgtgggtgactaacgataatagacacgctgtaaaagcaagggcggttccgattacgagtggctttttacggccaacacgatcgctccaggcacccatgaagatggggccaatcgcaagtccagccaaacacatagttagactcagttgaatcatggaagcagatgaatgaaaatcagcttccataatcggaaatgctggtagatacatatccactagtaggggtccataagcactcagtgaaccaagtaaaacagataaccatagtgttcttttttttgttaaaaccatgttaataaaccctcctaaataaaaaagtgtaaaaaaatagcccgttgaaaacgtagctagcgccgaacgaatttaattaattactattcatgttgcttcttagttacactaacataagaagtcgggtttgtggcgatatatgagcaatttttaatatgtaaatggtttctatttcagtttaaacaagttatgatggagataatgaaaaaagttgtcgaatgaggttttgccatgaaaattgcccaaaaaaataaaatattagaaacctgcctaattgcgggacggattatgattgaaagtggttctgaaatgtaccgggttgaagatacaatgaaccggattgcttataatgcaggcattcaaaagagtgttgtgtttacgacaccgaccggtttatttatcggaattgaaaatcaaccttatgtgcaactaggcgctgttgcggtgcggacgattaaccttggaaaagttgaaaatgtgaatactgcttcacggcaatttgcgactaaggaaattacgttggatcagttaatgttacggttaaaacaaattgatcaggatacagctcattttccgttgtggttacaaattacagctgcagcagtcatttcagcgtttttgatgattattttttctggtgaatatgattggttagacatcataccgtcagcggtagccggtgctttaggctatgccgcctttgcggcggtcaatcgggtcacaacgattcgctttatcggtgaatttttaagtgcgacagtgattgggatagtcgcctatctattaactaggtggcacttaggagtcgatatcgataatattatcattggggctgtaatgccattggtacctggtgtagcgattaccaactcgattcgagatttgctagcagggcatttattatctggtatggcacgtgggatggaggccatcctgagtgcctttgcaattggaacagggattgcgctcgtatttagattctttatgtaaagagaggttcatcagatgccatattgggttcagtttattattcaagcgttatttagttatatttcaacggttgcgtttggaatttgtattaatttaccaagacgcgcattattatggtgtggctttgccggtatggcagggtggcaggtctattggatgctctttaactttggtagcgggcggatgcttgctaatttgttgggtgcgttagctgttgggatttgtggcaatattatggcccgttataagcggatgccggtgattatctttaatattccagggttagtacccttagtgcccggtggaactgcgtatcgtgcgattcggaatctcgtgctaggcaacttaaatgaagcttcgacacaaggtgtttcagtaatcatgattgctggtgcgattgccgttggctttatgttagcgcaaattttagccgatataacacgaaaacgagcgattacgccgaaatgggtatcgcgtcactaaaaagtatgctataataagtttatgcgatgagtcgagtaagtctcggtaggcaactattctgcgaaggcagctaggagacccaaagatacaggataccacggttattcatttaaccacttgccgtattgcaagggtgttttcgcccgctgtgttgtggagcacaaggtgtttattcttcggaatactgtgaaaaaagccccttccgtcaggaaggggctttttttgtgcgttcattttcttgcatgacagcgttactgatggtgcgatggtcgactaattcaccaatccgttttagatgtttgagatgtgcatcgtagtgttccgaaaaaacgagcgcgtataaaacatttaataggaagatgatggaggtattaatggtaaagttgccgattttcgagtagagtttttcacgggttgtaatcggtaaaagcaagtgcattcttgcgaaagtcgattttcaccgatactggtaatcgcaatcgtcgggatgttgcgggtgcgtaaaatagtgttaagtgctagtaagttgggattctcgccagaataggaaattaaaatcgcgcaagcatccggactaagattataggcatcgtagttttcctcgccacgaaccgcagatagcgtaacgtttttttgaatagatggtcgtgatgccgattcagtcaactatgagctggccaagatctgtcaagaatacggatcaatcatgaagtcagttactgccgataatggcgctgagttctcggaagttggcgctgtacttaccggtgtcgctgacctttattatgcccatccatctcgttcctctgagcgtgggactaacgaagcgcataatcgaatgatccgctgcgatgtacccaagggtctatccatggatattttgggtcctcatgatatccaagcagttgagtcaaagctaaacaatttaccgcgccggcaaactggctatcaaacacccaaagagcttttctccgctgcttccgccggttaagttaagtccataaaatatgaatattaatgaaaatactgatttaataggatttatcgtgtggctaatttgttcttgcaatttgggagtcgaaaacaaatggatttcattcaagattaaaatgagttatattgtctttaaatataataaggattggtgatgatcatgaagattgttgtgattggctccgttgcagcggggacgagtgtggcagcaaaggcgcggcgaaatagtgaagttgatgagattgtcgtttatgaaaaaggtcaggatatttcttattcggtttgtggcatgccttattacgtagggggtgaggttgaagacctagagacgttaattccgcgcgatgcggcgtggttcaaaaaacgcttcaacgttgacattatgacgggtatcgaagtgatttcaatcgatgaaaaccaacaagcgctggtcttgaaaagctttgagacgggcgagttgtttgaagattattatgaccgcctagttttagcgacgggggccacgccacgcattattgcaccgttcgatgaagcctaccaaaacgtcttcacgatgcataacatggtagatacacgcgcaatcgacgcgtatttacagcaccattcagttcaaaatgtgacgatttttgggaccggttatgttgggcttgaaatgatggaacaatttcaaaaacgtggcttggacgtgacgttagttcaacgaagcgcgcaaattatgacccattttgatggtgatatggcctatcgtgctgaacaagttattcgtgctaacggggtgcatgtgttaaagagtgtaaccgcaaaacaagtgactgcgcaggatggtgtggtatcggcggtagaattgagtaatcagacgaccattcaaacggatttggtcctactagcacttggcgttgaaccacaaacgcagttggtcgaccatatgaagatagctaagggaccttcaggggcgttgaaggtcgaccaacaaatgttgacgactgtaccgaatatttacgcggtcggcgatgttgttgagagtttctccgtaattgatggctcaccactgtatcgaccaatgggttcgactgccaataaaatgggacgaattgccggcaattcattgactggcggtggcttaacgcaccgcgggattcttggaacggggattgttcggttgttcgatacaacgattgcacagactgggtttactgaagcagtcgcgcgagctaaggactatgatgtggaagtactctacaacattaaaccagggcatgcagattacttaaatggaaccgaaaacgtcattaaagccattgctggccgtcaaacgggaaaattattaggtgtacaaatcattggtaaagatggggttgataagcggattgacgttttcgtgactgccatcacattgggtgcgaaggtggccgatttattccatctcgatctagcttatcaaccactctatgcaaccactaaggatccagtgctctatacgggaatggcgctcgataatgcattgcatgggcggccactcttgcctccagctgaattggagcaacgcttggctgaaggtgaacgcttccagattctggacgtacgttcgaagcaaaaatatgcggacgagcatgttgaacatgccattaacatgccgcttgctgaaattcgtgatcggttcacggaattagatatggatattccaactgtcacctattgcaataaaggggttacggctaatgctgctcagaatttacttctgaacctcggttttaaatccgtgtataacttgagtgggggcttcaaaaattatcaggtagtcaaagcctacttgaatgataaataatataaaaataccgctgacaattcgctgtcagtggtatttttttgcgttgttatagatttttggtgaaaaattgagttaattctgaaaaaggaataagcgcgatacgatcatataaatcgacatgcccagctgcttttacggttaataactgttttgattcgttagcactggcaaaggcggcttcactgaaatgtcgtgaccatgcctcttcaccaacaacaaagagcatggcacgttctgtgatcgtttcgaggtcgcgcaatggatagaaatctaatagtttagtaaaagttgtacgagtgggatggagtgtcgagttggctgcgccacgttgggtacgataaaagtcgtagaattcacgttcgatatcagttgagttttcgtccagttcttcaggtactccatgggcgtaagtggttgcttgacctgcaatctctaatgtccgggatcgtgaggattcctcgattaatgcgttgccgcctagtgcatcacgctgttcgcgaacaatggcacccatatcggttaagttaatagttgcaagtgctttaatacgtgcgtctattttgagtgcgttgagcgcgaaaccaccggccgaaccaattgcgattaagccaatacggtcattggcgacacagtctagagtggttaggtagtcagtggctgctgagaaattctccgcatataagataggggcaatcgcgttgcgcagagcaccgttactccctccccaagcagattgatcaaatgaaacggttacaaacccttgttcagcgagcttaatggcatataggttagctgcctgttctttaacggcaccgatgggagcaccgatgattagtgctggaaaaacagttccgtcgagtctttgggaagaaagacgttagcagttacttgcatttcatagatattcttaaaagtgacgggatgctgttcaacggctgaactttgaaaccagttattggcgtcgtggtggacatcgccagttggtaaatccggattacgacggcgtgcattaattttaccggctgaatacgacggttgtctagatggcatgctactcctcctataaaaataatttcttatccttattataaaatataagaatgtgaaatactactttatattattaatttgtaaacgattaatttgatgtctgctagtgatgattgtaatagtcgataatggtcagatggttggcattttatagcgaagcgcggcaacgtcctatcctcgcaggtagtttcccaccaactactatcggcgctaagaagcttaacttctgtgttcgacatgggaacaggtgtatccttcttgctatcgccaccacactattttgtgcttgcgcactgagaagaacttcgttctctcaaaactgcataataagtaatatttcatttcaaaagcctaacattgcacctttggttaagtcctcgaccgattagtactagtccgctccatacatcgctgtacttccactcctagcctatctacctgatcatctttcaggggtcttacttccataaaggaatgggaaatctcatctcgaggggggcttcacacttagatgctttcagcgtttatcccgtccatacatagctacccagcgatgcgcctggcggcacaactggtacaccagaggtatgtccatcccggtcctctcgtactaaggacagctcctctcaaatttcctgcgcccgcgacggatagggaccgaactgtctcacgacgttctgaacccagctcgcgtaccgctttaatgggcgaacagcccaacccttgggaccgactacagccccaggatgcgatgagccgacatcgaggtgccaaacctccccgtcgatgtggactcttgggggagataagcctgttatccccagggtagcttttatccgttgagcgatggcccttccatacggaaccaccggatcactaagtccgactttcgtccctgctcgatttgtcaatctcacagtcaagctctcttatacctttacactctacgaatgatttccaaccattctgagagaacctttgagcgcctccgttacactttaggaggcgaccgccccagtcaaactgcccacctgacactgtctcccgccacgctaagtggcgcgggttagagtggtcatacagttagggtagtatcccaccaacgcctccatcgaaactagcgttccgatttctacggctcctacctatcctgtacaaactgtacaaacactcaatatcaagctacagtaaagctccatggggtctttccgtcctgtcgcgggtaacccgcatcttcacgggtattataatttcaccgagtctctcgttgagacagtgcccaaatcattacgcctttcgtgcgggtcggaacttacccgacaaggaatttcgctaccttaggaccgttatagttacggccgccgtttactggggcttcaattctgggcttcgcttacgctaactcatcctcttaaccttccagcaccgggcaggcgtcagcccctatacgtcatctttcgattttgcagagacctgtgtttttgataaacagttgtttgggcctattcactgcggctgacctgacggtcagcaccccttctcccgaagttacggggtcattttgccgagttccttaacgagagttcactcgctcaccttaggatattctcctcgaccacctgtgtcggtttacggtacgggtagtttatttctcactagaagcttttcttggcagtgtaacatcaggaacttcgctacttaatttcgctccccatcacaacttgtccttaaagaatcaagcatttcactcaactcaagacttgttgcttagacacacatttccagtcgtgtgcattccttagcttcctgcgtccctccatcgttcaaacaaaataaactagtacaggaatctcaacctgttggccatcgactacgcctttcggcctcgccttaggtcccgactaaccctgggaggacgagccttccccaggaaaccttagtcatacggtggatcagattctcactgatctttcgctactcatgccggcattctcacttctaagcgctccactagtccttacgatctagcttcatcgcccttagaacgctctcctaccgcggacacttacgtgtccacccacagtttcggtattatgtttagccccggtacattttcggcgcagcggcactcgactagtgagctattacgcactctttaaatggtggctgcttctgagccaacatcctagttgtctgtgcaccgccacatccttttccacttaacataaattttgggaccttaactggtgatctgggctgtttccctttcgactacggatcttatcactcgcagtctgactcccggaactaaatcaatggtattcggagtttatctgaattcagtaacccatgacgggcccctagtccaaacagtgctctacctccatgatccaatattccgaggctagccctaaagctatttcggagagaaccagctatctccaagttcgattggaatttcaccgctacccacacctcatccccgccattttcaactgacgtgggttcggtcctccagtgtgttttaccacaccttcaacctggacatgggtaggtcacttggtttcgggtctacatctatatactcactcgcccatttcagactcgctttcgctacggctccagcttttcactttaacctcgcatataaacgtaactcgccggttcattctacaaaaggcacgccatcactcattaacgagctttgactaattgtaggcacacggtttcaggatctatttcactccccttccggggtgcttttcacctttccctcacggtactggttcactatcggtcactagggagtatttagccttgggagatggtcctcccggattccgacggaatttcacgtgttccgccgtactcaggatccagaacggaggttaagttgtttaatctacgtggttatcacactctttgactcagcttcccagctgattcgattacaacttaacttggtaactccaatgttctgtcctacaaccccaagaagcaagcttcttggtttgggctcttccccgttcgctcgccgctacttagggaatcgatttttctttctcttcctgcaggtacttagatgtttcagttccccgcgtctaccttcattaagctatgtattcacttaatgataatacccgactaaaggtattgggttcccccattcggaaatctccggatcaaagcttacttacagctccccgaagcatatcggtgttagtaccgtccttcatcggctcctagtgccaaggcatccaccgtgcgccctttataacttaacctaactttacctacggtaaagggttattatttgagtttagcgatatgaactaattcatatttctattaaaaaactctttaaaacgcaatgttttctcggcttttaaaactaatatattacttattatccagttttcaaagaacaaagtttcatgaacgattttattctaatttaaatttaattaaattaaattagaatagtcgtatttaattcctctaaattaaagttttacaacattcgcagcttgtggtccacgtgtgccttcaacgatgtcgaattcgaccgcttggccttcttctaatgacttgaagccttcgtcttggattgcactgaaatgtacaaagatatcgtcttgaccttctgctgagataaagccgaaacctttttcattgttaaaccattttactgttcctttttccatgatgttactccttttaaatacacaattattatctagccaccagaatcggtcatctaaacaagtcaattatacgcgattttgtaaccgcatgcaagcgtaaaataaattaattgagtttatatcgggtccgccgttgatattgttcgccaggatgcaaaacaatattaccaaactcggtatgatggatggcatctggcatcatttgggcttcaatcgccactgcttggtggggttgaattgcctgatttgttaagtttggttcgtccccgaagccattggcggtataaataacgattgcattcccttctgtatcaattgtgatcgagcggccactttcgggatcgcgtaaaatcgcatccgctttacccggcgtttgattcaacaggaatggatgatcaaaaccaccgaccaatttagtttgcgtattttcactatcaaaagcggcttgcaaagctcgcggttgacgtaaatcaaagacagagcccgcaactgggactaattccccggttggtaagccgtctggttgaatggcaccaaaacggtcactatcgatttgcaatgtgtgttggccaacaaattgatcaaagtcccccgtcaaattcagatagacatggcatgttgggttaaacaacgtggttttatcagtcgttgcttgatagtcaattagccattcattggcctcatttagcgtatacgtcgtggtcaccgctaaattaccggggaatccattttcaccatctggactcgttaacatgaaaacgacactaatcgcatcatctttttcaaccactgatgattgccagatttgcgattcaaaactattggggccaccatgattcgtgttggcgccattattaatcggtgcttgataatcatgaccatcgagtgtaaaagcaccttgaccgatgcggccagctacgcgtcccactgtcgcaccaaaataagcttgttgctttacaaaatccgctagggtgtcatagccaatcacaacattggccatctgaccactttgatccggcatcaccaagtgagtaatcgttgcgccgtattctgtcacggctaattgatacccctgacgattctctagccaatactgccaaaccgtttgaccatttatttctccaaatgcttctcgccaatacttcatgaatgtccctccttataggttaaacatgttgcgtaaatttaataaatgctgcctgaccttgttcgttgcatttgaaaacaccagcgtcttctagaacgcgcatgaacactttgccgacttcagtccgcactaattccgttacgttatctgatgtaatcgatgtgttagcggctttaatcgtatctgcccattcttgatggtaagcggccatctggtttggttgatcgcagagatagtgttcaacctcagccatttcatctttgagtcgtggtggcaaaattgctaagcccatcacttcgattaaaccaatattttcttttttaatatgttgcacatctgcatgtggatgataaattccatctggatgttctgcagacgtttgattgtcgcgtagtaccaaatcaatttcgaattgaccgtctcgcatccgcgcaatcggcgtaatcgtatgatgtggtgtgccgtcttctgagtgggctaagatttggacacttggatcgctgtaattttgccaactagttaaaatttgtgcagcgagtgtttccaaatgcgttgcattcgcactcgtcaaacgaatgactgacattggccacttcacaattcccgcctgaatatcattatacccgttaaaatgtagtggtgtctcgattggcgccttagccattggaaaatcgtgacgccccccttgataatgttcatgggttaagatcgaaccaccgacaatcggtaaatcagcgttactcccagcgaaatagccggggaactgcttcacaatctgtaataaatttttgaaggtcgtttcattaatcaccattggttcgtgttgaccatcaaggaaaatcgaatgctcattaaaataagcatatggtgaatattggaagccccaagtctgacctgccaattcaaaacgaatgatgcgatgattacgccgtgctgggaaatctaaacgccccgtatacccctcattttccagacataattgacatttggggtagccggtttgtttcatcgttttggctaacgcaatttgtttcggatccttttccggcttcgataaattaatcgtgatttctaagtcgccatagtgcgtcggcacttgataagcgatatttttcgcgattgcggccactttaacgtagtcgttggcccgacttaattcataaaagtcggcaagtgcttgttggggatcactctcgtattgatgccaaaaatggcggttcaccgcacttggtaatggcgtcaccaaatccatcaacttcgcccctaaaatatcttgttctgccgctaaattctcaatccggctattcgcaactgcaagacgcaacaatgcgtcctttaatccgatgagactttgatcagtcaccgcaacgttactgtcctcttcaccaacaaggtctaagacgagattaaataagtactgttggtcttctgctttataaagtgtgtcttgaaagataatcactttttcaataaatgtttgaatcaattctcttgcttgcatatgctttcctctaccgatctgcgtatcctgcttcaatttaaaatcatctaggctggcctgatttgtaccatctttaattttagtaatattctcaaaccagtgatcgacgaaacttccattaccattaggcgtatctgagtaacgcgcaataaatctgacatttctgcctaacataccactgtttacagacatattggccacaaatccactctgaccagtattagcaataccattatatatcgtgcctacatcaggacgggggacagttgccatctggtaacggcctaactcgtgattattagttgcatctaaagcaactaaataccgataaggtttacctacactttggttatcagcaaaccaacctcttactgataaattaccatttacataagcaacactatctaaactagcggctgattcaattggtttatcaactttaatcgctttatggaaaccataatctacagaatttccattacctctaaaatcatccgtatatctagaaataattctaattcgatgtccaataatactgttcgtcaatggtacatctactgaaaatccgctatttatagaattaggaacatcagcatatgcgttgtgaacgtcatccctacgtgtacgatcaaccttcactcgctgaatttccctatttgtatcagcatccatgataaaaatgtaactgtatggttttattgtagattcagttgcggcatgccagccactaatatgcaaattgttaccacttacactcaagttatttagtgaagcaacatttttattcatttcaccatagtattgctgaactaatccaaagaattgattcatatcataaccgtattttgcaaaataggcatctggatccgtatggtctgttccaccaagataatgtgaaatattactatgtgaccaaactgttccaacaccgttattattttgagctaacgacggtgtcaaattgtattgatgtaacaagtatgccgtatatcaggctgaataactcgttgtcttggcaaaatcttcaaaatcacgggctgtcaccatctcgaattgcgtgaaatacttgttaccaatagcaccgctaccccaagccccataattagtgtcatgaatacttaagatacttccggcgtcaatgaaagtgtgtacaaaagctgactgccatccaccattaatttcataatctgcttcacttcgtgcactaaaattattgggattatccgtgtaatgaacagccacaccagatggtaatacatcatcggtcttataaccaaacattgagaaagtgtgtaattcttgagtaatatttggatgttgatagtttttttgtaaaatatagttattaacgttaggataacttctcgatatttctccactaaaagcacttgattttgtttcgattggcatcccaatatcatcggtcgcctttccatcactgtccgtttctttgcttccagtaggcgttgcttctttaatatcttgttctgtcaattgagatttcatctgatcaggtgtcatcacggttgctgcgctagcttgaccattcaataacataacagatgcacttagaaataatgctccactgatagataacttaatccacttttgcttcactgtcttatcccccaaataatatagtttacacctataacaaggcagcacaaaatgtccttatttaaaaccattaatttaatctactaaaattttcttaaaagaattcgtttttcctgtttaatgattaaactatctatcagtattgcaaacattactgaaattagatatgccacaaaaaatgtaactattatgctcagaataccgctactgaatcttaaataaggcgttattaataataaaactattccatgccctaaataaacaccatatgaatagtgtgctaaaaaaactacgagtttactattactcatttttttgcaaagtgtactccttaatataccctgatagacaactactgccaacaatagatacattggcgacaaatcatgaagcccccagccctttgattgtggaaaaataacagtcaatattacattaattacaacaaccatccctataattaaaccactttccatacatggaattacattccatttcttttctaaaagtcgaccaagtaagaaatagataagccaattagaaaaaggaaaactaattaatccccaattaatattaatcagttttagtaaccacccacttgtctggacaataattaaaacccaggtaaaaatagtttcttctttatccgtcaggttctccaacatcttactcaaaaatggtgctgcgatcaaatatgcaatcaacgggtacataaaccaaaaatagttcgttgtataatcttgaaatatatctaaaatcagcctccatccccatagtttaattcccatttgttgatgtgttaaataattcgtgaaacagtaaaacatgaactgatagataactagcggtatgaccacattaaataatttttttaaataatatctcttatagtcgcttcggctggtgcctttaaaatgtaaattgaaatgtccactgatcataaaaaataatggattacataacaacaccaaagattcgactacctctttaataatttggctgtttaagctctgctgcatttctattccatcagagacatgaataaaaataaccgctcccatagcaattactcgaataaaatataaaaaacgctgagcctcttttaaggagactcggcgtttttttattatttagtaaattcagcaattgcatcatcaatatgttgccgtactacctcaacatgatccatttcatcatcttctacatgtggtaaaggattacgtgctcgtcctacacttaccccacgtttagctaagattaacttcatcacatcatataaattacctttaaatgatgtcaattctgaaattaaatcattaattttaagttgaatttgaagagctttttcaaggtcatcctcacgaacgcaccgatccgcttccattaacaattctggataaacaccataagttccacctattataattatagaccctatacaaacatattttgtaaaaagccttttttctgttctttcaacaaatctaacttacgttgatgaagagtgatagtgttgtctaactgtttgaaaaataacccaattttttgttgacgacttttgtctcgcgctcttcattatttatcacgatgataaaaatcttttgtattaaagaagtcatttagaaccgtgttctcaccagtcattgtttcatgtaaacgaataccatcgacatttatccgtgcattacgataataatcatttgttaattgaccccatgatgtctgtgacgcatcaacattatcgaaaatactgaaaccgctactcttaagataagtgtactttgcattatcatttgtataatttgtaaatgagccaatatctgctccaaatgggaaaatcaatactggtgttttaccaacaattggttgtacttccttttgccaaagtgcagtgtcctttttgatatcatcaacactggccgtagtcatatttatatgaccccaggaatgcgatgcaaactgccaaccttcctttttcatagcgttagcaacctttgtcgctttcttagcttcgcgatgtgtcttttttgtatcaccatattgactctttgatgaacgataacctagcgccccattataacccgtttcagcaatcacaccctttgagccaccgtatgagaaatctggatgctttttgatgaaggtatcaataatcggtaccatgtcataatcaccaattttcttctgaccattattggtatattgatttttaacatcaccttgcttattgacgactaatttatctgcaaatccagaattcttcatatactcataatagttaacatcatcctgtgatataattaaaggcttcttgccttcaggtaatttgactggtttgaaagtcaccttcccttgtttatcaatcgaaatgatatctttaaagttaattaatacatagccattatcatataactgattcagcatcggcataaattcgtcgatggtcaccatataatctttgtatccctgtgcctgcttagatgagaaagctttaccaggatcaacaattagtgaatgataaaaaagatgtgaaatttttgtcggatcatcccacgtgaccaactttgactgttgcttattaatactcttttttagatgatcaactgttgttcctttgtgccccgataacactgattttgcttctttatattggtactgttgacttaatgattttgcctgctttactgtcttagttgtttgactatcagtttttgcagccataacatcatcatcaatattgccatataaccctaagcctgcccccaaaatcaacccaatgacaagactagttatcttggtttttatcacagctactcccccataatttttatgaatattaaacgacaagttagtgccattctatatcttattacctcaaaaataaaattattcgtattgttttataaatagtaaagatatcaaaaatgcgacataatcaaacaaaaaaggagtgattaaaatcactcccaaaaaaaatatttttaatgccacaatacctatttattgcgcatcatccttaaacttattatagtaatttgctcctgggaatacccagttagcacgaccgaatatcttgattgtcgctggaataataatcagacgaaccaagaaggcatcaaatagaaccccactggctaatgaaataccaattgacttaatcgttggatcttcaaccaaggcaaaacttccaaagacagcaatcataatcaaagcggctgtaataatgactggaccactctcttgcaatcctgttttaacagcccgatttgtatctccagtggcaatgtatgtctccctaatccgtgagaccatgaacacttcgtaatccatcgccagaccgaagacaattccaatcataatgactggcaaaaatgcaataattggtgatccttcactaatatggaaaacaccatcttgcataatcaatgtcgtcaatcctaatgatgcaatcaatgataaatgctcttatactaaaaaaatggactatttttattcagtccgtaaaatgaaagtataggagtatttttatgtcaattcgttattcacaagattttaaagattcactggatcatcagctttgacgattaattgttcttgagctgtttctttgcatagaaatataaagttgcttaagtgataaagattgattaccaaactaaaaagacgatttccataatatatggaaatcgtctttttagttcagattctgcttttgaattgtaatagtaagttgtatccaataaatataataagcgaagttatagaaattagaagtgtcagttttctaatagaactcatttgataggtgattgtaatgtgatggtttcctgtcctatgcaataaaatgcatactgttccgcgatttgaacgaatggttgggatagtatagccattatcggtgactttaacacccttgtagcgaatgactggagtatcgatcgtagcagaactggatgacgtatgatagttaaaataaaatgattgattagtgtgcttgagagagggactatcctgatagttattgttattcaccttaaacaatttttgattaatagtttgtaatttggataaattgatgtttgggtgatagtcgtagttattcggaggggtaatcgtttcataagttaatttggaattctgagagccatgttgaattagattagtacttgtttgtaaatgcaatgtcataattaagatgaaaagtagtagtaaggagtatttacgagttgaagtaggtaatttatttaataatttagaaaatataagtgtacctgaaaaaattataaaatagtttgctaacattaggaatctaaaaggaaactgaataatattaaagggtggacgattcaacaaataccatgggaacagagaggtgctcaaaatgattgccattaatccaatgagagcatctattgatacataattaaaattatgaagtaattggtaactgtaatgtagaattagtatggctaaaagaagtacgattaaaccaggactaatgacgtcgggggcaatatattgatttgagaagctactttgaattagtgttgcaaaactcgcagttttatcaagaagattaacagtcacaacagagcgtaatggttgataatgatattgttcaaaaatggagaatagttgaaaagaggacagtaacagagttattgttgttgctttaataagtgaaatgattagttgctttgatagattagtgatacaaaataataggcggaataggatgaaaacgctgattgtgagtagtgatagaatatggctgtaggtaactatcgtcataccaatagttagcataggccatttatagtaatctccacgaattaataattcaagtccacaaaaaactagtggtaaggctgtaattacaaatagttcacctaaatctgcacgaaaaaaactgtcaataatacgatatgtagagaatgtgtagatgacactaaaaataagtgcaggcagcttagctttagtgattgtcagaatagcatagtaagcaattagcagtgttgacagggtgacaatccaataatagataatataggcggtaggccaactacctaaaaataaacggaatatggcgattggatagctatttaataaataaggataaaaaaggttgtaggctgatccgtatgagccaaaagctgagtaatcaaaattaggaattaaatgtccagattttaatgtgttatacaggctcaatgtgcgtggcatatggaaagaaaaatcgtcacttgcaaatagaatttcaggatgaactagaatgggtaatataaagattagacttaatattataaatcctaaaagaattaataaagtttgtttctgtttacgcaacatgaaatataaatcctttcgcttgaaatatagtattggtaatgaatatatgtattatacaataaatagtaacagtaagtcgtacaaatatagaaaccgagatatgatatactttttttgaacaatagaatttctaatatctatttaatgaaatatcgaggggatggtttcttttggaacgtaaacgtgatttaaggtatgatatgtttataaaaaaatagcataaaagtgttgacttcatttatcatgtgaactatgataagcacataagttaataaagcgattgaaaagcgcagtagaattagtaaccactattacagagagtcgggatttggtgagacctgacatatgtttctaagtcgaattacactttttgttttatcaaatcgtacgttgaatttacgttaaaatctagagtgatattttgaaagtgcactttcaaaatataacacgggtggtaccgcgaaaaaatgacatttcgtcccagtaatctttattttattaaagattgctgggacttttttaatttaggaggaaattttgatgagaaaaaatattattgatgaattaacatggcgtgatgcgattaaccaacaaacagatgctgaaggattgcgtgaattagtagaaaacaacaagatttctttatactgtggggctgatccaactggtgatagtttacacatcggtcatttgattccattcatgatgatgaagcgattccaattagctggacatcacccatacatcttaatcggtggtgggacaggatcaattggtgatccaagtggtcgtaattcagaacgccagttacaaacaatggaaaaggttcaaaaaaatattgaagctttatcaaaccaaatgcggaaattatttggtaaagatgccaatgttacttttgttaataactacgattggttatcaaaaatctcattgttggactttttaagagattacggtaagaatttcaacatcaatacaatgttagctaaagatattgttgctagtcgtttggaagtggggatttcatttactgaattcacataccaaattctacaatcaattgatttcaaacacttacatgatgaacataacatccaactgcaaattggtggggctgatcaatggggcaatattacttcagggattgatatgattcataaacttgaaggtagcgacgaacccgtatacggtttaacaattccattaatgttgaaagctgacggaactaagtttggtaagacagcaggtggtgcaatctggcttgacgctgaaaagacttcaccatacgaattctaccaattctgggtaaatcaagatgatcgtgatgttattaaataccttaaattcttcacattcttagaagaagacgaaattgaagaattggcacaaaaagttgcaacagaacctgaaaaacgtgaagcacaaaaacgtttagcacaagaagtgacacgttttgttcacggtcaagaagcattagatgaagcggaacatattactgaattactttttgaaggtaatatcaaagctttagatgttgttgaagcagaacaagcttttggtaaagcaccatcagttgaaattagtaaagaagctaaaaacattgttgacttcttagtggatacaggtattgaatcttcaaaacgtcaagcacgtgaagatgttcaaaatggtgccattacaattaatggtgaccgtatccaagaaactgatgcgatgattgacccgatgactagctttgatggcaagtttgtgattattcgccgtgggaagaagaattacttcttagcacgtgttactgactagagacgttccaaaaattaaatgaaggcttttgtatctatactgaatgttactgggttcttcgtgaatgtagatcatatagtataaccccaaaatacaactgcaaaggtagccgtcaaacgttgtttgacggctatttttcgtactctaaaaaatcggaatcgctttcatatgtttgcttttatggacaatgagcgtattctattgattggggttatactaaaacatatttgcaaagtcaatttcgctagcaaataaattaagtaacaaaacaagagctacaaacttttaatcgagagtttgatcctggctcaggacgaacgctggcggcgtgcctaatacatgcaagtcgaacgcactctcgttagattgaagaagcttgcttctgattgataacatttgagtgagtggcggacgggtgagtaacacgtgggtaacctgccctaaagtgggggataacatttggaaacagatgctaataccgcataaaacctagcaccgcatggtgcaaggttgaaagatggtttcggctatcactttaggatggacccgcggtgcattagttagttggtgaggtaaaggctcaccaagaccgtgatgcatagccgacctgagagggtaatcggccacactgggactgagacacggcccagactcctacgggaggcagcagtagggaatcttccacaatggacgaaagtctgatggagcaacgccgcgtgagtgaagaaggttttcggatcgtaaaactctgttgttggagaagaacgtatttgatagtaactgatcaggtagtgacggtatccaaccagaaagccacggctaactacgtgccagcagccgcggtaatacgtaggtggcaagcgttgtccggatttattgggcgtaaagcgagcgcaggcggtttcttaagtctgatgtgaaagccttcggctcaaccgaagaagtgcatcggaaactgggaaacttgagtgcagaagaggacagtggaactccatgtgtagcggtgaaatgcgtagatatatggaagaacaccagtggcgaaggcggctgtctggtctgtaactgacgctgaggctcgaaagcatgggtagcaaacaggattagataccctggtagtccatgccgtaaacgatgagtgctaggtgttggagggtttccgcccttcagtgccgcagctaacgcattaagcactccgcctggggagtacgaccgcaaggttgaaactcaaaggaattgacgggggcccgcacaagcggtggagcatgtggtttaattcgaagcaacgcgaagaaccttaccaggtcttgacatcctttgaccactctagagatagagctttcccttcggggacaaagtgacaggtggtgcatggttgtcgtcagctcgtgtcgtgagatgttgggttaagtcccgcaacgagcgcaacccttattactagttgccagcatttagttgggcactctagtgagactgccggtgacaaaccggaggaaggtggggacgacgtcaaatcatcatgccccttatgacctgggctacacacgtgctacaatggatggtacaacgagtcgcgagaccgcgaggtttagctaatctcttaaaaccattctcagttcggattgtaggctgcaactcgcctacatgaagccggaatcgctagtaatcgcggatcagcatgccgcggtgaatacgttcccgggccttgtacacaccgcccgtcacaccatgagagtttgtaacacccaaagccggtgaggtaaccttcgggagccagccgtctaaggtgggacagatgattagggtgaagtcgtaacaaggtagccgtaggagaacctgcggctggatcacctcctttctaaggaataatacggaaaaccttgtacatttgcgaagtcgaaactttgtttagttttgagaggtctactctcttgtatcccatcacacgcgctttatcaaaacaattgattccaatctatgacaaaccaatgatttactatccaatgtcagtgctcatgttggccgggattcaagatattatgattatctcaaccccaactgacacaccacggttcaaagagttatttggcaacggcaatgatttggggttaaatatcgaatacgccgttcaagaacaacccaatggtttggcagaagctttcgtgattggggcggacttcatcggcgatgattcagtatgcttaatcttaggtgacaacatctattatggtggtggcctttcagaaatgctccaaagagcggctcaaaaagaatcaggcgcaaccgtttttggttatcatgtgaatgatccagaacgctttggcgttgttgattttgatgaaaatatgcatgctaaatcaatcgttgaaaagccagaacatccggcaagtaactatgcggtgactgggttatacttctacgacaaccaagttgtcgacattgcgaagaatattaaaccttcaccacgtggcgaactagaaattacagacatcaataaagcgtatcttgaaaaaggccagctagatgttgaattaatgggccgtgggtttgcttggttagatactggaacccacgattcattacaagaagccagcagttttattgcgaccgttcaaaaacggcaaaacttgaaagtggcgtgtctagaagaaattgcttaccgcatgcattacatcgataaggcaaaagtcattgaattagcgcaaccactcaagaaaaacgactacggtcaatatttattgcgattagtaaaagaagattaggggtaagtaatcatgggtaagttaaaagtcacaacaactaaattacaagacgttaaaattattgaaccagccgtctttggtgatcatcgtggattctttacagaatcttattcagatcgcgatttcaaagaagcgggcatcgatattgatttcattcaagataatcactcactttcaacgcaagcaggcgttttacgaggcttacatttccaacgcggcaaagctgcgcaaacgaaattaattcgcgtggtgactggggctgtcttagatgtcatcgttgacgttcgtgcaggttcaccaacttacaaacaatgggaagggtacatcctttctgccagcaatcaccgtcaattacttgttccaaagggcttcgcccatggctttgtcactttgacggataacgttaacttcttgtacaaatgtgatggctactatgatgcagaagctgacggcggtatttcattcaagacaccagaattaaacatcgattggccaattgattttgaccaagcaattacgtctgaaaaagatgccaaccaaccaacctttactgaatttgaaaaagataatccgtttgtttacggtgaaatttaaggagatcaacacactatgaaaaatattattgttactggtggggccggctttatcggttctaacttcgtgcactatgtggttaataaccacccagaagttcacgtgacggttttagataaattaacttacgctgggaaccgtgcgaacttggccggtttacccgcagaccgtgtggaattagttgttggcgatatctgtgacgctgaattagtcgataagttagttcaaaagacagacgcagtggtacactatgggtttttctgtccactaatatgttcaacttaaattttacaatctaccttatcagggacataattatgatgataataataccatgaatcaatggataaaaattggacaaaatgctatgccaacatggaaactacggatatttcagctgaaattttatcctctattctttaaattgtaagggagaaaaataatgataggtacaaaatcggtgctcacaattggacgtaagtttattttacttatggttatacttatgcccatacataatatggtttttgcaacgcttattcacggaacaattgataacatttggagagatgttttacttattatttgtatagctatttcgcttcttgctaataatggacgtttctctttagggaaacttggtgttccaattcttttatcttggatagtttgtttaatatatatgttttcatccgatagacctgacgtcgctgctaatttagcgcgtacttatataatgccaacgattatttattttattataattaatagcggtgctaataataaatatataaatctaattgaaaatatttttgtatacgttgcggttgtattatcaatatttggtgtatttcaggcatttgttttgggagactcttttctcgtcaaaataggttatggttcgttagatggacatcttgctagtaattctttctatatcagtcacttctatggaatacaaagaactgcgagtacatttgcctctcctaatatttgtggtgtctattttgggatggctattttgattctttcaacgaatttcggtaaaatcaagcagagtactttatttatggttattcttgtgctgggattagtcactacctttagtagaagtgcgatacttggaactgtggttgccttggcagtttatcatagaagaaaattagttaggctaaggataaagctacgatatgtatttatattaccaataataatagttattgtaattctaatagactcgattattttaaatgggttgattgctaatatgatttttagtagcttttcttcaaccgctggaatgacagatccatctgcaacaaagcatgtttctgatttatgggaacctatcgaagaaattcttgctaatccttggggactcggatttggacataatggtccaatagtggctggacagtataccgatgtaaatttagtagagtcatccatatatctgctcatgtatgattttggcattttaggaggtgtaatttttcttttaccctatttaaatggattgtttcatgcacttggacgaaataatctaatatacaaaggtggaacaatttgtatattagttctttttacttatttgctattaccaaatgtagaaacgtacgaacttttgttttttacttttctgtttattggtatggatgaagtcagagtttctattaataagagagaaaaattcttctttaataataacgaaactaaaattagtgattaaattaaaacataccggttgaactactcattgatttgatactcttctaaaactgctgtaatgccggcaaagctaaggccaacgttgaactactcattgatttgatactcttctaaaacacggcactgatgtcttattcgggaaatgtggttgaactactcattgatttgatactcttctaaaaccagagtggacattcgcacgaccagaattctgttgaactactcattgatttgatactcttctaaaactcaaagatcaacatacattaaatacgagcggttgaactactcattgatttgatactcttctaaaacagaccatcaagcgtgggatttaaggttgtagttgaactactcattgatttgatactcttctaaaacacaggtcgtgactttagcaagatggatagtgttgaactactcattgatttgatactcttctaaaaccaatagatacatcaataccagatacatattgttgaactactcattgatttgatactcttctaaaacagcaatgattaaaagcccgttaacgtgtaagttgaactactcattgatttgatactcttctaaaactcagaaacttatggtcggctgttgctttgagttgaactactcattgatttgatactcttctaaaaccgaacaacagaagacatcacagtcaacgctgttgaactactcattgatttgatactcttctaaaacccatctgtgttaatgcgtgagccaagtcttgttgaactactcattgatttgatactcttctaaaactaaatgtggaacaaatgtgcaaccacaggagttgaactactcattgatttgatactcttctaaaacatattatggattacagacgactataatcaagttgaactactcattgatttgatactcttctaaaaccaacaagaacagcccattcactgaacaacggttgaactactcattgatttgatactcttctaaaactatccatcacaacgcgacaaccaacaagaagttgaactactcattgatttgatactcttctaaaacacgcctgcttcttaatttcctctttgtattgttgaactactcattgatttgatactcttctaaaactcgagaccttaacgaacaaacttcaaccgggttgaactactcattgatttgatactcttctaaaactcaccgcgttatcaattgacgtttgcccctgctcctatgtcaataaatggcacatctttttctaaacactcgttctaattctgtcggaattaaaccaactgatgtaatttgaggttcggattaccaagtcctcaaaattggaaaaagttgtttgaaaggcaaactctctcttcaacaatgagtgaaaagcttcaattggcccattatcataaggataaccttgttttgagtatgagtggctaatctgatgccgttcaagtaaagtttcaacttcgttgctggtgtactgtgaacccatgtcagagtgaaaatattgtggcttttgatgacattcaagcgcctgattaatcgtttctacaactaacgtcgcctccatctgacgaccaatcttgaaagcaagaacttgatgaacctttggttcgtaaatagaactgagataaacccaggttcctggacgtaattccaaataagtaatgtcagcacgccatatccttgcattgggctggtgcttgattaaattggggcgttgtgaatgatccacatgagtgccaggttttttaaatcgccgattcattaaagagtgaatctccatttccctcattaatcgtaaaattcgttttgacccaacacagatgcctgacttgcgaagcaccatcgttattcgtggataaccataggcacgataattattttcccaaatcaatttaattttttctttgagttgattatcaacacgttcgtgttgactaggttgatatcttttccaatggtaataggtgctgcgcggtaatttcagtgccgaaagaataattgataagcggtgtcgcaataactgatcttctatgaagacaaggcaattaattcgtcctaatgctttcccagtaacaccgccgcagcttttaaaatttcgagttcctcctttaatcgctgattttccttttgaagttgtttgaattctttggacgttacttcagtaccgtcttctagctcaactgatttagcgcctttaacccagttatgaattgcggctggagaaacaccgtattcctcggaaagcgagcgaatagatcttttctcttcacgatgcatcttcacaatgctggctttaaaatcatcttgatatcgtttcattggaatgctcctatcttgttttattaattatggcacaactgttcagaaatttatgtaccaaatactaggataggagcaggctcctatgtcaagaatccggacataaaagtacgaacaaatttgactttcaatttaaattacttaatttaattttcggaggccgaagttttagtcccgttcagattttaaaaacgctttagagtatattaaataagccccaacattattgaatttaatagcctgtagctacgctacaagtgaaatacgatcactgttataccaacgaatatagttatcaattccggcgattgcttcatgaattgtcttaaaatcttggaaattaacgtattcacgtttcaaaattgaatgaaaactttcaattcgcgcgttatcgccgggctgaccctttcgggagtaagaatgcttgataccatacttcgataaagtgttttcaaataagtcacttgtgtattggcttcccatatcactatgaataatttgtggtttaactgcttgcgccatgacttgggtaataacgttagtcgctagttctttagtcatctgcgtattaagttggtaagcaataacccgtcgggttactggattatagacactagctaggtaacaccaagtatggttaaggggaatgtacgtaatatcagtcaataaaataccagattgatcagttaactgcttaatcaagtttggtcgctgatcataatcagtctgagtggttggcttattgattcgtttaaccattctagatctaatccctaattcacacatttgttgatagaccagacgctgactaacgtgaatatcagactgttgatttagtaagatcgttaatcgtgggtagccatacattggatatcttaaccaagccgttaacacttcttgtttaattaaatgccggcggcgttcagttctacttggctgccaatgtagataatcatagtaggttgagcgcggaattttgagtactgataagatacgcgtaatgcggtgcccagcaagtaaattagcgttgacgacttctaacacgagggcacgccctttaataattagctttttgccatgagcaccgccgctcgttttaaaatatcaagttcttcttttaaccgtttattttctttaatcagagcacgttcatttgatgatagcactttagtgttgttaggatcagcttgtttaatccacttagtgaccatatgttgtgactgcgtctgcattagtaatgtctaattcggctgcatctgtccccacatattcgatttggttttcgtctaataaatgtcgtaattcggtccctaattgaccatttgcaccggtgattaaaattttcatcgttaactcttctccttaaaaaaagtaggcgttcgcctactctcatttaatttcatatttattgaccattcttagcgtagttggcttccacggctgctttttctgcttgccaccagtcttgatgctcccgataccagtcgatggtatgttgtaagcctgatttaaaatcagtgaattctggttgccagcctaattcttcacgtaatttcgttgaatcgatggcataccgtaagtcatgacctgggcggtctttaacttgatcgtaagcatctttgggttgccccattaattctaagattaattccaaaacatctttgttgttttgttcgccatcggcaccgattaagtaggtttcaccgattttacctttggttaggattgcccaaacggcacttgaatgatcattcgtatgaatccaatcacgcacattttgacctgaaccgtaaagttttggtcgaatcccacttaaaatattggtaatttgacgtggaatgaatttttcaatgtgttggtaaggcccatagttgtttgaacagtttgaaatagttgcttgtaagccaaatgaacggacccaagctcggactaacaagtctgagctcgcctttgatgatgaataagggctacttgggttataacgcgtttcaggcgtgaatttttcaccaacgccttcgccgtgaccaggtaagtcttcacgtaatggtaaatcaccatacacttcatcggttgaaacgtggtgataacgcacattatacttgcgacaagcttcgatcaacgtatatgaaccgatgatgttcgtttgaataaagggtgaaggatcttttaaagagttatcgttgtggctttcggcggcaatgacagttttagtattaggtggcgccggctacatcggctcgcacaccgttgatcaattaattcaacgcggcacggatgtcgccgttgtcgacagtctcgtcactggccatcaagccgccattaattcacaagcgcgcttttaccaaggcgatattcgcgacaaagatttcatgcgcagcgtcttccaacaagaaaaagtcagcggtgtgattcatttcgccgctttctcaatcgtgcccgaatcgatgcaagcaccacttaaatatttcgacaataacacatacggcatgactgccttactcgaagtgatgaatgaattcgacgtcaaacacatcgtcttttcatcaacagcggccacttatggggaaccgaaatcaattccaattaaggaatccgacccacaagtcccaactaacccgtatggtgaaagtaaattaatgatggaaacgatgatgaaatgggctgacagagcttacggtattaaattcgttgcattacggtacttcaatgtcgctggtgccaaaccagatggttcaatcggcgaagatcatcacccagaaacccacttgttaccaatcgtgttacaagtggctgctggcaaacgtgaacaactctccatctttggtgatgattatgatacaccagatggcactaacgtccgcgactatgtccacgcgttagacttagccgacgcccatattttggccctcggttacctcgaagaaggccatgatagtaacgcctttaacttaggctcatcaactggtttttcaaatatggaaattgtcgaagccgctcgcaaagtgactggcaaggcaattcctgtgacaatggcaccgcgtcgtgctggtgatccaagtactttgattgccgcaagtgacaaagcacgcgaagtcttaggttggacgccacagtatgacaatatggaagcaattattgaaactgcctggaattggcatttaaatcatccaaattacaagtttaatccgaacaagcccggaatctttcaatggcagtctgttgatgatgtatttttaatggtcgttgattaattagttcaagtgctgctaggatctcatcagtcgttacttggctaaaattggtctttttcgggaagaaccagcgtaaccgtctattaaaatattcattggaacctcgctcccatggtgaatatggatggcaaaaataaactttgatctgataatcctgttctaaggcctgataattggcaaactctttaccatgatcaacagtaatggattttacttggggaccgaaggcccccataaacttgccaaaggcggtgtttagagccttagccgttctattaggggctttgatggcccatagaagtcgggtcttacgttctacgaatgtaaccagacatgatcgtgactcacttcgactagaaagcaccgtatctacttcccaatgaccaaaagctaaccgttgattaacagttgttggccgttgttcgatggaagtcccacttgtaaatttcccacgattttcgctcactcggtgctggcggacattccgattgggtagatcagtcaatttgaaggggagccagccacgattaagccaattataaattgacgcagtgctcaagttataagcggccgcaatggtttctggtgaccaggttaatcgtaagtgattggtaattaaagtcgctaatgctgccgtcagcatcgaacgacgaccgcaattccgccttttgcgatctgcatcttgctgagctaattctggatcataaggtttaactcggtccaactcatagctaatcgtagctttggcgacgcctaaggcgtcagccattacttggtaagatttattcccctcattgaccagttgtgctagtgcgccacgttgaaaacgtgataaagtagatgtacccaaagtaatcactccctatattggttggaattagaattcaaattaaaaacaatgcgattgcgattaatatcggcaaatgatgtggtatcaggagataactctttggtcataattaacccaatgcctttatctaatgcataatttagcaaatcattgattatattatccatatatgctatttcccccgtagtagccgttttatgatttccatatcctcttctggtattggtttgccatcaaaagtcatgagaacattttcgtcttcaatatctacttcttttggcttattagtggctgatggattgtctgttttacctagcaagtagtctgtagatacacctaaaacatcggcaacagcttttaaattattaaaactaggttcctttgttttccatgaatatatagtatttgttccgagatttgctaattcattaacctttgttaaactataaccacgtttttttgaaatttcttttattcgttctagagttgtcatatcaacatttcctccaatgtttatgacaaattaattggacttagactaattaattattgacaaaaattagactaaggcttatgattaattcatcaagtaattaagcgataaaaaaccgacagcttcataacgttactttggcgagaaaacggaagttgaattatttttattagcttatttcgtatgccttaatattagactaagtctaattagttgtcaacaacttgatgaataaattacaaaggagggtaaaaagatgaatgaacaagcacttttagattcagccaaagcggttgaaaaacagattaagattaatttacttaaccgcggaatgagtcagcgcgatttatccgatttaatcggtgaaaacccgactcaagtgaaccgagcaatcaaaggcgatatgagtcctaagtcgattcgtattcgggaaaagatttacacggtatttattatggtcttgggttttacggtactaatattttttagccagtattatggtaaaaagctcttttcacgtaatataagcaaactactcactttgatatttatacttaatattttagtttcattttcgagaactaaaatactaacattttttgttatggtaattatttttatggggtagattgcaagaaataacttgaacaaatttagtaacgcagatcacgcaaaaagatctcaatcggtgttcgccaatttaaacatttgagtggtcgggaattcaaataccagttaatttgaatcaattcatcatcggtaatctcatcaatcggttgacctttgggaatgaagcggcgtagtactcggttgcgattttcattactgcctcgttcatgtggcgaataagcgtgcgcaaagtacagcggaacaccgatctgttcttcaatcaaattgtagttggcgaattctttcccatggtcaacagtaagggtcttgagattatctcctaactggttagccaattctaaaatagccttggtcattgaagtactatctcgtccattaagccgtttaacgatggtaagccgactcttacgctcgacaaacgtagctactgcttgacctttacgttttccagataaaactgtatcagcttcgaagtgacctgaagtattacgatcagaaatttcagctggacgatcttcgatggaacgtccatgactaaaagtaccacgggtttctttagctcgtttgcgacgaataccatggtcaggtaaatcagtcacattaatatccagtagtccctgatttcgggaaaacaggattcgaacctgcgaccccctggtcccaaaccaggtgctctaccaagctgagctatttcccgttatatgcacccagtaggagtcgaacctacaaccttctgattcgtagtcagacactctatccagttgcgctatgggtgcatttttcattatgatgccgaggaccggaatcgaaccggtacggtagtcacctaccgcgggattttaagtcccgtgcgtctgccagttccgccaccccggcttaatcataatgaaagcggaagacgggattcgaacccgcgacccccaccatggcaaggtgatgttctaccactgaactacttccgcatcttaatgccgactagacgattcgaacgcccgaccctctgattacaaatcagatgctctaccaactgagctaagtcggcataataagataactttcattgaatattcaattgaatgcgggtgaagggacttgaacccccacgtctatatagacactagaacctaaatctagcgcgtctgccaattccgccacacccgcattttggcgtgtaacttggccgatgagtcgtgacaggctcgaactgtcgaccctctgattaaaagtcagatgctctaccaactgagctaacgactcaatggaggttacagggctcgaacctgtgaccctctgcttgtaaggcagacgctctcccaactgagctaaacctccatcaataaaaatcatcaatccaaaccgatatttgtgaaactagcgtttcataagtatcggtttctttttggtagaaagcttcggctttcataatatggaaaaagctctccattgctgcattatctaaacatgttgctttgcgagacatactttgaaaaatgcgatgttctttcaagatatgagtccaatcttgatgctggtattgaaatccttgatctgagtggactgttgtccggtattttaaattcttagggattttcttaactgctcgattcaaaacagttgtagtaaattcaacagtagggtgtttactaacttgatggctgagaatttcacctgagaataaatcataaatacatgtgaaataggcgcgttcatcaattgtcttggttccccagcgaacttcagtaacgtctgttactagtttttgataaggacgatcagtgaagaaacgacggttgattaagttcttagcaacggtgccaacattgcctctatatgaattatatttacgagtacgtttgttaaatgcagttgatagtaattgcagttctcgcattaagacaagtacttttttatgatttactaagatattcatacgatgtaattcaccagttacacgacgataaccgtacgctggatgattcttcttgattatttggatggtttgtttaacagattggtcagatgaaccgttcggttcatgactaataatgtataccaaactaaaaaaataatcatttggttattagcattaataacactaataacttactctagtaaaatttttctatataactattcaattgatactgaacaatttatgaataagggtatcccattcaaatggtggattagtctaggtcgctatgggttagcttttttatcaaaacttactacagtcggaattgatttaaatgtaacgctcacgaatgttataacctatttactccttttcactagttcagtcatcctatcatttattatatggcgttcagaaaataagataaattcattttgggtagttattgctgcagggttgtatctaacgtcgccaacgatgttagaacaaactaatttcgttttgcaaagtatggaagttacttttgcgtttaacttattatatatagcgatcttattcattcaatactttattgaaacaaaacataaactattctttgctcttgcaataatatcgacaataattgcattctcaatctatacatcattacaagcagctttcgttgtggtgactctgctagctctctatttacactctgattcgaactcatattttagctacataaaaaatgcagtgccttatgttatagttctcgttgcctccacactgttcaatatagtcgctacaaaggcaatctcaaaagccttaaatatacctaaaaataattatttttttggaggagtagcgaagtggctaaacgcggcggactgtaaatccgctccttcgggttcggtggttcgaatccactctcctccatattttttagggatatagtttaaaggtagaactacggtctccaaaaccgtcagtgtgggttcaattcctactatccctgtttatattatagcttgcatattatgtgtgaatgtagtataattattcatgttaatgatggcggtattggtgaagtggttaacacatcggtttgtggatccgacatacgtgggttcgattcccacataccgcctttattcttgggctatggccaagcggtaaggcaacaggttttgatcctgtcatgcgctggttcgaatccagctagcccaatttactttttaagggacaggatttgttcttttatggcggtatagccaagtggtaaggcagaggtctgcaaaacctttatcaccggttcaaatccggttaccgcctttgcgtttaggcgctaaccttaattggtcaaaatgccggtgtggcggaattggcagacgcgcgggattcaaaatcccgtttcctcacggaagtatcggttcgaccccgatcaccggtataattgaacattatacagttttaaaaagccttagagatagggctttttttgttgcgttaataccatggttcttttgaatactaatagttaatggtgtttccagagctcagtattatcgttatcgatcccccaaaccttcaaaacgccgggccgaagatgcgggcttgaaacaacggattctgcggatctttgcggaatttaagcagcgatacggtgttatgaagatccaccatgaattgaatctggaacttcaaccactgcagcttcggtgcagtccacgacggatttcccggctcatgaaggaactggatagccactccgttaccgtcaataagtggaaagcggcttcggcttccaaaaccaaggttgaacagcgtcccaacttgcttaagcaggatttctcgaccactggtttaaatcaaaaatggaccgctgatatgacctatattcaaacgaagcgtaatggctggtgttacttatcaaccatcatggacctgcactcacgacggattatcggctattcgttctcaaaaaagatggctactgatttagtcttaaagacccttgaaagcgcggttaaaaatcgaaccattactggggacctgattatccatacggatttaggatcacagtataccagcgatgattacaatcaacgtttaactgagctacatatccgccactcatacagccgtaagggttatccgtatgataatgcgccaatggaatcctttcacgcttccctcaaaaaggaatgtgtttatccagattgcgggagtagggtttgaacctacgaccttcgggttatgagcccgacgagctaccagactgctccatcccgcgataatataaaggagaatgagagattcgaactctcgcgtgggcagaacccacctgacggttttcaagaccgttcccttcagccagacttgggtaattctccataaaacatataaaatgtaacattgttacaatgacccgtacgggatttgaacccatgataccgccgtgaaagggcggtgtcttaaccacttgaccaacgggccatacaaaacggagaaggagggatttgaaccctcgcgccagtttcccgacctacacccttagcaggggcgcctcttcagccacttgagtacttctccatattatttagataatgggcctaaatggactcgaaccatcgacctcacgcttatcaggcgtgcgctctaaccagctgagctataggcccatgaaaagcgggtgacgagaatcggactcgcgacaacagcttggaaggctgtggttttaccactaaactacacccgcatattcatgattttgaaaagaacaagcctgaattggtttatcactgcgcagcttatacagctgtcgatgctgctgaagaagaacctggcaagtcaatcaattacaaagtgaacgtggttggaacgcaaaacattgccaatgctgctgaagcaatcggcgcaacgcttgtttacattagtacggattatgtctttgatggtacgaatgatcaaatgtacacagaagaaaccccagctgcacctaagaatgaatatggtcgcacaaaattggctggtgaagaagccgttgcaaatacaatgagcaaatactacatcatccggacttcatgggtctttggtgaatatggtaagaacttcgtttacacgatgttaaatcttgcgaagacgcatgatcatttaacagtcgttagtgatcaagtcggtcgtccaacttggacccggacgttggctgaattcatgttatacgctgttcaaaacgacgtgccgtatggcttgtatcaactttcaaatgacaattcatgtacttggtatgaatttgcgag
